(19) United States
(12) Patent Application Publication
(10) Pub. No.: US 2021/0206818 A1
(43) Pub. Date: Jul. 8, 2021

(54) MESSENGER RIBONUCLEIC ACIDS FOR THE PRODUCTION OF INTRACELLULAR BINDING POLYPEPTIDES AND METHODS OF USE THEREOF

(71) Applicant: ModernaTX, Inc., Cambridge, MA (US)

(72) Inventors: Eric Yi-Chun HUANG, Boston, MA (US); Joshua P. FREDERICK, Charlestown, MA (US); Kristine MCKINNEY, Cambridge, MA (US); Christina HENDERSON, Stow, MA (US); Kahlin CHEUNG-ONG, Boston, MA (US); Joseph BOLEN, Cambridge, MA (US); Stephen Michael KELSEY, Brookline, MA (US); Michael MORIN, Salisbury, MA (US); Sushma GURUMURTHY, Sharon, MA (US); Kerry BENENATO, Sudbury, MA (US); Stephen HOGE, Brookline, MA (US); Iain MCFADYEN, Arlington, MA (US); Vladimir PRESNYAK, Manchester, NH (US)

(21) Appl. No.: 16/071,131

(22) PCT Filed: Jan. 20, 2017
(86) PCT No.: PCT/US2017/014441

§ 371 Date: Jul. 19, 2018

Related U.S. Application Data
(60) Provisional application No. 62/338,444, filed on May 18, 2016.
(60) Provisional application No. 62/286,295, filed on Jan. 22, 2016.
(60) Provisional application No. 62/286,299, filed on Jan. 22, 2016.
(60) Provisional application No. 62/286,308, filed on Jan. 22, 2016.

(51) Int. Cl. C07K 14/47; A61K 9/51; A61P 35/00

(52) U.S. Cl. CPC C07K 14/4705; A61K 9/5123; A61K 38/00; C07K 2319/70; A61P 35/00

(57) ABSTRACT

The invention features isolated mRNAs encoding at least one intracellular binding domain, including mRNAs comprising one or more modified nucleobase and preferably lacking an encoded scaffold polypeptide, and methods of using the same, for example, for inducing apoptosis and/or treating cancer (e.g., liver cancer or colorectal cancer).

### RELATED APPLICATIONS

[0001] This application claims the benefit of U.S. Provisional Patent Application Ser. No. 62/286,295 filed on Jan. 22, 2016; U.S. Provisional Patent Application Ser. No. 62/286,299 filed Jan. 22, 2016; U.S. Provisional Patent Application Ser. No. 62/286,308 filed Jan. 22, 2016; and U.S. Provisional Patent Application Ser. No. 62/338,444 filed on May 18, 2016. The entire contents of the above-referenced applications are incorporated herein by this reference.

### BACKGROUND OF THE INVENTION

[0002] A number of therapeutic tools exist for modulating the function of biological pathways and/or molecules that are involved in disease. These tools include, for example, small molecule inhibitors and therapeutic antibodies. However, many biological molecules (e.g., proteins) that are known to be involved in diseases, e.g., cancers, are not readily druggable using small molecule inhibitors or therapeutic antibodies. In particular, some intracellular targets, such as Bcl-2 family members (e.g., anti-apoptotic Bcl-2 family members), and members of the Hippo signaling pathway such as Yes-associated protein (YAP) and transcription co-activatory with PDZ-binding motif (TAZ), are difficult to target with small molecule inhibitors, and are also not accessible to therapeutic antibodies administered into the blood stream due to the permeability barrier of the cell's plasma membrane.

[0003] Clearly, therefore, there exists a need for new therapeutic compositions capable of modulating intracellular disease targets, including anti-apoptotic Bcl-2 family members, YAP and TAZ, and related methods for delivery these agents to cells to treat and prevent diseases such as cancers.

### SUMMARY OF THE INVENTION

[0004] The present disclosure provides compositions including isolated mRNAs encoding one or more intracellular binding polypeptides. In exemplary aspects, the mRNA constructs encoding the intracellular binding polypeptides do not encode a scaffold polypeptide for presenting the intracellular binding polypeptides, since it has been determined that such a scaffold polypeptide may not be necessary for some types of intracellular binding polypeptides, such as a BH3 domain, to function effectively, for example intracellularly, to modulate the activity of a target to which the BH3 domain(s) binds. In some aspects, the isolated mRNAs encode multiple BH3 domains, referred to herein as multimer constructs. In some aspects, the isolated mRNAs include one or more modified nucleobase and are referred to as modified mRNAs (mmRNAs). In some aspects, the isolated mRNAs are present in pharmaceutical compositions. In other aspects, the mRNAs are present in nanoparticles, e.g. lipid nanoparticles. The disclosure provides compositions including isolated mRNAs encoding at least one Bcl-2 homology 3 (BH3) domain, as well as methods of using such compositions, for example, for inducing apoptosis and/or treating cancer (e.g., liver cancer or colorectal cancer).

[0005] In a first aspect, the disclosure features a modified messenger RNA (mmRNA) encoding at least one Bcl-2 homology 3 (BH3) domain and lacking a scaffold polypeptide, wherein said mmRNA comprises one or more modified nucleobases. In one embodiment, the mmRNA encodes at least three BH3 domains. In one embodiment, the mmRNA encodes two to ten BH3 domains. In one embodiment, the mmRNA encodes three BH3 domains. In certain embodiments, the BH3 domains are selected from the group consisting of PUMA BH3, Bim BH3, Bad BH3, Noxa BH3, Beclin BH3 and a truncated BID protein containing a BH3 domain, and combinations thereof. In certain embodiments, the BH3 domains comprise the amino acid sequence of X₁X₂X₃X₄X₅X₆X₇X₈X₉DX₁₀X₁₁X₁₂, wherein X₁, X₅, X₈, and X₁₁ are any hydrophobic amino acid residue; X₂ and X₉ are Gly, Ala, or Ser; X₃, X₄, X₆, and X₇ are any amino acid residue; X₁₀ is Asp or Glu; and X₁₂ is Asn, His, Asp, or Tyr. In one embodiment, X₅ is leucine.

[0006] In certain aspects, the BH3 domain-encoding mRNAs of do not encode a scaffold polypeptide, other aspects provide mRNA which does comprise a scaffold polypeptide. Suitable scaffold polypeptides (e.g., mmRNA-encoded scaffolds) are described herein.

[0007] In certain embodiments, the mRNAs of the disclosure encode more than one BH3 domain, referred to herein as multimer BH3 domain constructs. In certain embodiments of the multimer BH3 domain constructs, the mRNA further encodes a linker located between each BH3 domain. The linker can be, for example, a cleavable linker or protease-sensitive linker. In certain embodiments, the linker is selected from the group consisting of F2A linker, P2A linker, T2A linker, E2A linker, and combinations thereof. In certain embodiments, the linker is an F2A linker. In certain embodiments, the linker is a GGGS linker. In certain embodiments, the multimer BH3 domain construct contains three BH3 domains with intervening linkers, having the structure: BH3 domain-linker-BH3 domain-linker-BH3 domain.

[0008] In certain embodiments, the mRNAs of the disclosure further comprise one or more microRNA (miR) binding sites. For example, in one embodiment, the mRNA comprises an miR122 binding site. In another embodiment, the mRNA comprises an miR142.3p binding site. In another embodiment, the mRNA comprises an miR122 binding site and an miR142.3p binding site.

[0009] In various embodiments, the mRNA constructs of the disclosure can further comprise at least one IRES sequence. In various embodiments, the mRNA constructs can further encode an epitope tag(s).

[0010] In another aspect, the disclosure provides an mRNA construct, such as a modified messenger RNA (mmRNA), encoding at least one truncated BID polypeptide that includes its Bcl-2 homology 3 (BH3) domain, wherein the mmRNA comprises one or more modified nucleobases. The truncated BID polypeptide containing the BH3 domain contains fewer amino acid residues than a full-length BID protein. For example, in one embodiment, the truncated BID (tBID) containing a BH3 domain consists of amino acids 61-195 of the BID protein. In another embodiment, the truncated BID (tBID) containing a BH3 domain consists of amino acids 77-195 of the BID protein. In certain embodiments, the truncated BID (tBID) polypeptide containing BH3 domain mRNA construct encodes multiple copies of the truncated BID polypeptide containing a BH3 domain, such as two to ten copies of the truncated BID polypeptide. In one embodiment, the mRNA construct encodes three copies of a truncated BID polypeptide. In embodiments in which the mRNA construct encodes multiple truncated BID polypeptides, each containing a BH3 domain, the construct can further encodes a linker located between each truncated BID polypeptide, such as the linkers described above.

[0011] In some embodiments, the BH3 domain-encoding mRNA encodes an amino acid sequence selected from the group consisting of SEQ ID NOs: 196, 197, 207, 225, 234, 236, 237, 291 and 294. In some embodiments, the BH3 domain-encoding mRNA comprises any one of SEQ ID NOs: 225, 244, 245, 246, 273, 281, 283, 284, 290 and 293.

[0012] In another aspect, the disclosure features a modified messenger RNA (mmRNA) encoding one or more intracellular binding peptides selected from the group consisting of: a TOPK inhibitory peptide, a SALL4 inhibitory peptide, a Ras inhibitory peptide, a p53 inhibitory peptide, a PP2a inhibitory peptide and a STAT3 inhibitory peptide, wherein the intracellular binding peptide lacks a scaffold polypeptide, and wherein said mmRNA comprises one or more modified nucleobases. In one embodiment, the mmRNA encodes at least three intracellular binding peptides (e.g., three TOPK inhibitory peptides, three a SALL4 inhibitory peptides, etc). In one embodiment, the mmRNA encodes two to ten intracellular binding peptides.

[0013] In certain embodiments of the multimer intracellular binding peptide constructs, the mRNA further encodes a linker located between each peptide (e.g., each TOPK-inhibitory peptide). The linker can be, for example, a cleavable linker or protease-sensitive linker. In certain embodiments, the linker is selected from the group consisting of F2A linker, P2A linker, T2A linker, E2A linker, and combinations thereof. The invention also relates to methods of using such compositions, for example, for treating cancer.

[0014] In another aspect, the disclosure provides compositions including isolated mRNAs encoding one or more YAP binding polypeptides, also referred to herein as YAP inhibitory peptides. In some aspects, an mRNA encodes a scaffold polypeptide for presenting the YAP binding polypeptide. In other aspects, an mRNA does not encode a scaffold polypeptide; rather, expression of the one or more YAP binding polypeptides intracellularly is sufficient for their function.

[0015] In another aspect, the disclosure features a modified messenger RNA (mmRNA) encoding at least one YAP inhibitory domain and lacking a scaffold polypeptide, wherein said mmRNA comprises one or more modified nucleobases. In one embodiment, the mmRNA encodes at least YAP inhibitory domains. In one embodiment, the mmRNA encodes two to ten YAP inhibitory domains. In one embodiment, the mmRNA encodes three YAP inhibitory domains. In certain embodiments, the YAP inhibitory domains are selected from the group set forth in SEQ ID NOs: 448-462, including combinations thereof.

[0016] In some embodiments, the mRNAs of the invention encode a scaffold polypeptide and one or more YAP inhibitory domains, wherein the mRNA is chemically modified to comprise one or more modified nucleobases. Suitable scaffold polypeptides (e.g., mmRNA-encoded scaffolds) are described herein.

[0017] In certain embodiments, the mRNAs of the disclosure encode more than one YAP inhibitory domain, referred to herein as multimer or tandem constructs. In certain embodiments of the multimer YAP inhibitory domain constructs, the mRNA further encodes a linker located between each YAP inhibitory domain. The linker can be, for example, a cleavable linker or protease-sensitive linker. In certain embodiments, the linker is selected from the group consisting of F2A linker, P2A linker, T2A linker, E2A linker, and combinations thereof. In certain embodiments, the linker is an F2A or a P2A linker. In certain embodiments, the linker is a GGGS linker. In certain embodiments, the multimer YAP inhibitory domain construct contains three YAP inhibitory domains with intervening linkers, having the structure: YAP inhibitory domain-linker-YAP inhibitory domain-linker-YAP inhibitory domain.

[0018] In some embodiments, the mRNA that selectively inhibits YAP encodes an amino acid sequence selected from the group consisting of: SEQ ID NOs: 481, 483, 488, 490 and 498. In some embodiments, the mRNA that selectively inhibits YAP comprises any one of SEQ ID NOs: 508, 510, 515, 517, 518 and 519.

[0019] In other aspects, the disclosure provides a lipid nanoparticle comprising an mRNA, such as a modified mRNA (mmRNA) of the invention. In certain embodiments, the lipid nanoparticle may include a cationic and/or ionizable lipid. In some embodiments, the cationic and/or ionizable lipid is DLin-KC2-DMA or DLin-MC3-DMA. In some embodiments, the lipid nanoparticle is a liposome. In certain embodiments, the lipid nanoparticle may further include a targeting moiety, such as a targeting moeity conjugated by a covalent linkage to the outer surface of the lipid nanoparticle.

[0020] The present disclosure provides a polynucleotide comprising an open reading frame (ORF) comprising mmRNA as described herein, (e.g., inhibitory YAP domain or BH3 polypeptide, e.g., a BH3 multimer, e.g., Puma BH3 multimer), wherein the uracil or thymine content of the ORF relative to the theoretical minimum uracil or thymine content of a nucleotide sequence encoding the at least one intracellular binding domain as described herein (% U_{TM} or % T_{TM}), is between about 100% and about 150%. In some embodiments, the % U_{TM} or % T_{TM} is between about 105% and about 145%, between about 105% and about 140%, between about 110% and about 140%, between about 110% and about 145%, between about 115% and about 135%, between about 105% and about 135%, between about 110% and about 135%, between about 115% and about 145%, or between about 115% and about 140%. In some embodiments, the % U_{TM} or % T_{TM} is between (i) 110%, 111%, 112%, 113%, 114%, 115%, 116%, 117%, or 118% and (ii) 132%, 133%, 134%, 135%, 136%, 137%, 138%, 139%, or 140%.

[0021] In some embodiments, the uracil or thymine content of the ORF relative to the uracil or thymine content of the corresponding wild-type ORF (% U_{WT} or % T_{WT}) is less than 100%. In some embodiments, the % U_{WT} or % T_{WT} is less than about 95%, less than about 90%, less than about 85%, less than 80%, less than 79%, less than 78%, less than 77%, less than 76%, less than 75%, less than 74%, or less than 73%. In some embodiments, the % U_{WT} or % T_{WT} is between 65% and 73%. In some embodiments, the uracil or thymine content in the ORF relative to the total nucleotide content in the ORF (% U_{TL} or % T_{TL}) is less than about 50%, less than about 40%, less than about 30%, less than about 20%, or less than about 14%. In some embodiments, the % U_{TL} or % T_{TL} in a Puma BH3 multimer is less than about 14%. In some embodiments, the % U_{TL} or % T_{TL} in a YAP inhibitory multimer is less than about 14%. In some embodiments, the % U_{TL} or % T_{TL} is between about 12% and about 13%. In some embodiments, the guanine content of the ORF with respect to the theoretical maximum guanine content of a nucleotide sequence encoding the at least one intracellular binding domain (% G_{TMX}) is at least 69%, at least 70%, at least 75%, at least about 80%, at least about 85%, at least about 90%, at least about 95%, or about 100%. In some embodiments, the % G_{TMX} is between about 70% and about 80%, between about 71% and about 79%, between about 71% and about 78%, or between about 71% and about 77%.

[0022] In some embodiments, the cytosine content of the ORF relative to the theoretical maximum cytosine content of a nucleotide sequence encoding the at least one intracellular binding domain (% C_{TMX}) is at least 65%, at least about 70%, at least about 75%, at least about 80%, at least about 85%, at least about 90%, at least about 95%, or about 100%. In some embodiments, the % C_{TMX} is between about 60% and about 80%, between about 62% and about 80%, between about 63% and about 79%, or between about 68% and about 76%. In some embodiments, the guanine and cytosine content (G/C) of the ORF relative to the theoretical maximum G/C content in a nucleotide sequence encoding the at least one intracellular binding domain (% G/C_{TMX}) is at least about 86%, at least about 90%, at least about 95%, or about 100%. In some embodiments, the % G/C_{TMX} is between about 80% and about 100%, between about 85% and about 99%, between about 90% and about 97%, or between about 91% and about 96%. In some embodiments, the G/C content in the ORF relative to the G/C content in the corresponding wild-type ORF (% G/C_{WT}) is at least 102%, at least 103%, at least 104%, at least 105%, at least 106%, at least 107%, at least 110%, at least 115%, or at least 120%. In some embodiments, the average G/C content in the 3rd codon position in the ORF is at least 20%, at least 21%, at least 22%, at least 23%, at least 24%, at least 25%, at least 26%, at least 27%, at least 28%, at least 29%, or at least 30% higher than the average G/C content in the 3rd codon position in the corresponding wild-type ORF.

[0023] In some embodiments, the ORF further comprises at least one low-frequency codon. In some embodiments of the polynucleotides disclosed herein the ORF is at least 87%, at least 88%, at least 89%, at least 90%, at least 91%, at least 92%, at least 93%, at least 94%, at least 95%, at least 96%, at least 97%, at least 98%, at least 99%, or 100% identical to a polypeptide described herein.

[0024] In some embodiments, the ORF has at least 87%, at least 88%, at least 89%, at least 90%, at least 91%, at least 92%, at least 93%, at least 94%, at least 95%, at least 96%, at least 97%, at least 98%, at least 99%, or 100% sequence identity to a sequence selected from the group consisting of SEQ ID NOs: 43 to 52, 74-105, 127-136, and 300-324.

[0025] In some embodiments, the polynucleotide is single stranded. In some embodiments, the polynucleotide is double stranded. In some embodiments, the polynucleotide is DNA. In some embodiments, the polynucleotide is RNA. In some embodiments, the polynucleotide is mRNA. In some embodiments, the polynucleotide comprises at least one chemically modified nucleobase, sugar, backbone, or any combination thereof. In some embodiments, the at least one chemically modified nucleobase is selected from the group consisting of pseudouracil (ψ), N1-methylpseudouracil (m1ψ), 2-thiouracil (s2U), 4′-thiouracil, 5-methylcytosine, 5-methyluracil, and any combination thereof. In some embodiments, the at least one chemically modified nucleobase is 5-methoxyuracil. In some embodiments, at least about 25%, at least about 30%, at least about 40%, at least about 50%, at least about 60%, at least about 70%, at least about 80%, at least about 90%, at least about 95%, at least about 99%, or 100% of the uracils are 5-methoxyuracils.

[0026] In some embodiments, the polynucleotide further comprises a miRNA binding site. In some embodiments, the miRNA binding site comprises one or more nucleotide sequences selected from SEQ ID NO: 298 and SEQ ID NO: 299. In some embodiments, the miRNA binding site binds to miR-142. In some embodiments, the miRNA binding site binds to miR-142-3p or miR-142-5p. In some embodiments, the miR142 comprises SEQ ID NO: 297.

[0027] In some embodiments, the polynucleotide further comprises a 5′ UTR. In some embodiments, the 5′ UTR comprises a nucleic acid sequence at least 90%, at least about 95%, at least about 96%, at least about 97%, at least about 98%, at least about 99%, or about 100% identical to a 5′UTR sequence selected from the group consisting of SEQ ID NO: 327-351, or any combination thereof. In some embodiments, the polynucleotide further comprises a 3′ UTR. In some embodiments, the 3′ UTR comprises a nucleic acid sequence at least about 90%, at least about 95%, at least about 96%, at least about 97%, at least about 98%, at least about 99%, or about 100% identical to a 3′UTR sequence selected from the group consisting of SEQ ID NO: 352-369, or any combination thereof. In some embodiments, the miRNA binding site is located within the 3′ UTR.

[0028] In some embodiments, the polynucleotide further comprises a 5′ terminal cap. In some embodiments, the 5′ terminal cap comprises a Cap0, Cap1, ARCA, inosine, N1-methyl-guanosine, 2′-fluoro-guanosine, 7-deaza-guanosine, 8-oxo-guanosine, 2-amino-guanosine, LNA-guanosine, 2-azidoguanosine, Cap2, Cap4, 5′ methylG cap, or an analog thereof. In some embodiments, the polynucleotide further comprises a poly-A region. In some embodiments, the poly-A region is at least about 10, at least about 20, at least about 30, at least about 40, at least about 50, at least about 60, at least about 70, at least about 80, or at least about 90 nucleotides in length. In some embodiments, the poly-A region has about 10 to about 200, about 20 to about 180, about 50 to about 160, about 70 to about 140, about 80 to about 120 nucleotides in length.

[0029] In some embodiments, the polynucleotide encodes an intracellular binding polypeptide that is fused to one or more heterologous polypeptides. In some embodiments, the one or more heterologous polypeptides increase a pharmacokinetic property of the intracellular binding polypeptide. In some embodiments, upon administration to a subject, the polynucleotide has (i) a longer plasma half-life; (ii) increased expression of the polypeptide encoded by the ORF; (iii) a lower frequency of arrested translation resulting in an expression fragment; (iv) greater structural stability; or (v) any combination thereof, relative to a corresponding polynucleotide encoding the at least one intracellular binding domain.

[0030] In some embodiments, the polynucleotide comprises (i) a 5′-terminal cap; (ii) a 5′-UTR; (iii) an ORF encoding at least one intracellular binding domain; (iv) a 3′-UTR; and (v) a poly-A region. In some embodiments, the 3′-UTR comprises a miRNA binding site.

[0031] The present disclosure also provides a method of producing a polynucleotide of the present invention, the method comprising modifying an ORF encoding at least one intracellular binding polypeptide by substituting at least one uracil nucleobase with an adenine, guanine, or cytosine nucleobase, or by substituting at least one adenine, guanine, or cytosine nucleobase with a uracil nucleobase, wherein all the substitutions are synonymous substitutions. In some embodiments, the method further comprises replacing at least about 90%, at least about 95%, at least about 99%, or about 100% of uracils with 5-methoxyuracils.

[0032] The present disclosure also provides a composition comprising (a) a polynucleotide of the invention; and (b) a delivery agent. In some embodiments, the delivery agent comprises a lipidoid, a liposome, a lipoplex, a lipid nanoparticle, a polymeric compound, a peptide, a protein, a cell, a nanoparticle mimic, a nanotube, or a conjugate. In some embodiments, the delivery agent comprises a lipid nanoparticle. In some embodiments, the lipid nanoparticle comprises a lipid selected from the group consisting of
[0033] 3-(didodecylamino)-N1,N1,4-tridodecyl-1-piperazineethanamine (KL10),
[0034] N1-[2-(didodecylamino)ethyl]-N1,N4,N4-tridodecyl-1,4-piperazinediethanamine (KL22),
[0035] 14,25-ditridecyl-15,18,21,24-tetraaza-octatriacontane (KL25),
[0036] 1,2-dilinoleyloxy-N,N-dimethylaminopropane (DLin-DMA),
[0037] 2,2-dilinoleyl-4-dimethylaminomethyl-[1,3]-dioxolane (DLin-K-DMA),
[0038] heptatriaconta-6,9,28,31-tetraen-19-yl 4-(dimethylamino)butanoate (DLin-MC3-DMA),
[0039] 2,2-dilinoleyl-4-(2-dimethylaminoethyl)-[1,3]-dioxolane (DLin-KC2-DMA),
[0040] 1,2-dioleyloxy-N,N-dimethylaminopropane (DODMA), (13Z,165Z)—N,N-dimethyl-3-nonydocosa-13-16-dien-1-amine (L608),
[0041] 2-({8-[(3β)-cholest-5-en-3-yloxy]octyl}oxy)-N,N-dimethyl-3-[(9Z,12Z)-octadeca-9,12-dien-1-yloxy]propan-1-amine (Octyl-CLinDMA),
[0042] (2R)-2-({8-[(3β)-cholest-5-en-3-yloxy]octyl}oxy)-N,N-dimethyl-3-[(9Z,12Z)-octadeca-9,12-dien-1-yloxy]propan-1-amine (Octyl-CLinDMA (2R)),
[0043] (2S)-2-({8-[(3β)-cholest-5-en-3-yloxy]octyl}oxy)-N,N-dimethyl-3-[(9Z,12Z)-octadeca-9,12-dien-1-yloxy]propan-1-amine (Octyl-CLinDMA (2S)), and any combinations thereof.

[0044] In some embodiments, the delivery agent comprises a compound having the formula (I)

[chemical structure]

[0045] or a salt or stereoisomer thereof, wherein
   [0046] R₁ is selected from the group consisting of C₅₋₂₀ alkyl, C₅₋₂₀ alkenyl, —R*YR″, —YR″, and —R″M′R′;
   [0047] R₂ and R₃ are independently selected from the group consisting of H, C₁₋₁₄ alkyl, C₂₋₁₄ alkenyl, —R*YR″, —YR″, and —R*OR″, or R₂ and R₃, together with the atom to which they are attached, form a heterocycle or carbocycle;
   [0048] R₄ is selected from the group consisting of a C₃₋₆ carbocycle, —(CH₂)ₙQ, —(CH₂)ₙCHQR,
[0049] —CHQR, —CQ(R)₂, and unsubstituted C₁₋₆ alkyl, where Q is selected from a carbocycle, heterocycle,
[0050] —OR, —O(CH₂)ₙN(R)₂, —C(O)OR, —OC(O)R, —CX₃, —CX₂H, —CXH₂, —CN, —N(R)₂, —C(O)N(R)₂, —N(R)C(O)R, —N(R)S(O)₂R, —N(R)C(O)N(R)₂, —N(R)C(S)N(R)₂, and —C(R)N(R)₂C(O)OR, and each n is independently selected from 1, 2, 3, 4, and 5;
   [0051] each R₅ is independently selected from the group consisting of C₁₋₃ alkyl, C₂₋₃ alkenyl, and H;
   [0052] each R₆ is independently selected from the group consisting of C₁₋₃ alkyl, C₂₋₃ alkenyl, and H;
   [0053] M and M′ are independently selected from —C(O)O—, —OC(O)—, —C(O)N(R′)—, —N(R′)C(O)—, —C(O)—, —C(S)—, —C(S)S—, —SC(S)—, —CH(OH)—, —P(O)(OR′)O—, —S(O)₂—, an aryl group, and a heteroaryl group;
      [0054] R₇ is selected from the group consisting of C₁₋₃ alkyl, C₂₋₃ alkenyl, and H;
   [0055] each R is independently selected from the group consisting of C₁₋₃ alkyl, C₂₋₃ alkenyl, and H;
   [0056] each R′ is independently selected from the group consisting of C₁₋₁₈ alkyl, C₂₋₁₈ alkenyl, —R*YR″, —YR″, and H;
   [0057] each R″ is independently selected from the group consisting of C₃₋₁₄ alkyl and C₃₋₁₄ alkenyl;
   [0058] each R* is independently selected from the group consisting of C₁₋₁₂ alkyl and C₂₋₁₂ alkenyl;
   [0059] each Y is independently a C₃₋₆ carbocycle;
   [0060] each X is independently selected from the group consisting of F, Cl, Br, and I; and
   [0061] m is selected from 5, 6, 7, 8, 9, 10, 11, 12, and 13; and provided when R₄ is —(CH₂)ₙQ, —(CH₂)ₙCHQR, —CHQR, or —CQ(R)₂, then (i) Q is not —N(R)₂ when n is 1, 2, 3, 4 or 5, or (ii) Q is not 5, 6, or 7-membered heterocycloalkyl when n is 1 or 2.

[0062] The present disclosure also provides a composition comprising a nucleotide sequence encoding at least one intracellular binding domain and a delivery agent, wherein the delivery agent comprises a compound having the formula (I)

[chemical structure]

[0063] or a salt or stereoisomer thereof, wherein
   [0064] R₁ is selected from the group consisting of C₅₋₂₀ alkyl, C₅₋₂₀ alkenyl, —R*YR″, —YR″, and —R″M′R′;
   [0065] R₂ and R₃ are independently selected from the group consisting of H, C₁₋₁₄ alkyl, C₂₋₁₄ alkenyl, —R*YR″, —YR″, and —R*OR″, or R₂ and R₃, together with the atom to which they are attached, form a heterocycle or carbocycle;
   [0066] R₄ is selected from the group consisting of a C₃₋₆ carbocycle, —(CH₂)ₙQ, —(CH₂)ₙCHQR,
[0067] —CHQR, —CQ(R)₂, and unsubstituted C₁₋₆ alkyl, where Q is selected from a carbocycle, heterocycle,
[0068] —OR, —O(CH₂)ₙN(R)₂, —C(O)OR, —OC(O)R, —CX₃, —CX₂H, —CXH₂, —CN, —N(R)₂, —C(O)N(R)₂, —N(R)C(O)R, —N(R)S(O)₂R, —N(R)C(O)N(R)₂, —N(R)C(S)N(R)₂, and —C(R)N(R)₂C(O)OR, and each n is independently selected from 1, 2, 3, 4, and 5;
   [0069] each R₅ is independently selected from the group consisting of C₁₋₃ alkyl, C₂₋₃ alkenyl, and H;
   [0070] each R₆ is independently selected from the group consisting of C₁₋₃ alkyl, C₂₋₃ alkenyl, and H;
   [0071] M and M′ are independently selected from —C(O)O—, —OC(O)—, —C(O)N(R′)—, —N(R′)C(O)—, —C(O)—, —C(S)—, —C(S)S—, —SC(S)—, —CH(OH)—, —P(O)(OR′)O—, —S(O)₂—, an aryl group, and a heteroaryl group;
      [0072] R₇ is selected from the group consisting of C₁₋₃ alkyl, C₂₋₃ alkenyl, and H;
   [0073] each R is independently selected from the group consisting of C₁₋₃ alkyl, C₂₋₃ alkenyl, and H;
   [0074] each R′ is independently selected from the group consisting of C₁₋₁₈ alkyl, C₂₋₁₈ alkenyl, —R*YR″, —YR″, and H;
   [0075] each R″ is independently selected from the group consisting of C₃₋₁₄ alkyl and C₃₋₁₄ alkenyl;
   [0076] each R* is independently selected from the group consisting of C₁₋₁₂ alkyl and C₂₋₁₂ alkenyl;
   [0077] each Y is independently a C₃₋₆ carbocycle;
   [0078] each X is independently selected from the group consisting of F, Cl, Br, and I; and
   [0079] m is selected from 5, 6, 7, 8, 9, 10, 11, 12, and 13; and provided when R₄ is —(CH₂)ₙQ, —(CH₂)ₙCHQR, —CHQR, or —CQ(R)₂, then (i) Q is not —N(R)₂ when n is 1, 2, 3, 4 or 5, or (ii) Q is not 5, 6, or 7-membered heterocycloalkyl when n is 1 or 2.

[0080] In some embodiments, the compound is of Formula (IA):

[chemical structure]

[0081] or a salt or stereoisomer thereof, wherein
   [0082] l is selected from 1, 2, 3, 4, and 5;
   [0083] m is selected from 5, 6, 7, 8, and 9;
   [0084] M₁ is a bond or M′;
   [0085] R₄ is unsubstituted C₁₋₃ alkyl, or —(CH₂)ₙQ, in which n is 1, 2, 3, 4, or 5 and Q is OH, —NHC(S)N(R)₂, or —NHC(O)N(R)₂;
   [0086] M and M′ are independently selected
   [0087] from —C(O)O—, —OC(O)—, —C(O)N(R′)—, —P(O)(OR′)O—,
   [0088] an aryl group, and a heteroaryl group; and
      [0089] R₂ and R₃ are independently selected from the group consisting of H, C₁₋₁₄ alkyl, and C₂₋₁₄ alkenyl.

[0090] In some embodiments, m is 5, 7, or 9.

[0091] In some embodiments, the compound is of Formula (II):

[chemical structure]

[0092] or a salt or stereoisomer thereof, wherein
   [0093] l is selected from 1, 2, 3, 4, and 5;
   [0094] M₁ is a bond or M′;
   [0095] R₄ is unsubstituted C₁₋₃ alkyl, or —(CH₂)ₙQ, in which n is 2, 3, or 4 and Q is OH, —NHC(S)N(R)₂, or —NHC(O)N(R)₂;
   [0096] M and M′ are independently selected
   [0097] from —C(O)O—, —OC(O)—, —C(O)N(R′)—, —P(O)(OR′)O—,
   [0098] an aryl group, and a heteroaryl group; and
      [0099] R₂ and R₃ are independently selected from the group consisting of H, C₁₋₁₄ alkyl, and C₂₋₁₄ alkenyl.

[0100] In some embodiments, M1 is M′. In some embodiments, M and M′ are independently —C(O)O— or —OC(O)—. In some embodiments, 1 is 1, 3, or 5. In some embodiments, the compound is selected from the group consisting of Compound 1 to Compound 147, salts and stereoisomers thereof, and any combination thereof.

[0101] In some embodiments, the compound is of the Formula (IIa),

[chemical structure]

or a salt or stereoisomer thereof.

[0102] In some embodiments, the compound is of the Formula (IIb),

[chemical structure]

or a salt or stereoisomer thereof.

[0103] In some embodiments, the compound is of the Formula (IIc) or (IIe),

[chemical structure]

[0104] or a salt or stereoisomer thereof.

[0105] In some embodiments, R₄ is selected from —(CH₂)ₙQ and —(CH₂)ₙCHQR. In some embodiments, the compound is of the Formula (IId),

[chemical structure]

[0106] or a salt or stereoisomer thereof,
[0107] wherein R₂ and R₃ are independently selected from the group consisting of C₅₋₁₄ alkyl and C₅₋₁₄ alkenyl, n is selected from 2, 3, and 4, and R′, R″, R₅, R₆ and m are as defined in claim 60 or 61.

[0108] In some embodiments, wherein R₂ is C₈ alkyl. In some embodiments, R₃ is C₅ alkyl, C₆ alkyl, C₇ alkyl, C₈ alkyl, or C₉ alkyl. In some embodiments, m is 5, 7, or 9. In some embodiments, each R₅ is H. In some embodiments, each R₆ is H.

[0109] In some embodiments, the composition disclosed herein is a nanoparticle composition. In some embodiments, the delivery agent further comprises a phospholipid. In some embodiments, the phospholipid is selected from the group consisting of
[0110] 1,2-dilinoleoyl-sn-glycero-3-phosphocholine (DLPC),
[0111] 1,2-dimyristoyl-sn-glycero-phosphocholine (DMPC),
[0112] 1,2-dioleoyl-sn-glycero-3-phosphocholine (DOPC),
[0113] 1,2-dipalmitoyl-sn-glycero-3-phosphocholine (DPPC),
[0114] 1,2-distearoyl-sn-glycero-3-phosphocholine (DSPC),
[0115] 1,2-diundecanoyl-sn-glycero-phosphocholine (DUPC),
[0116] 1-palmitoyl-2-oleoyl-sn-glycero-3-phosphocholine (POPC),
[0117] 1,2-di-O-octadecenyl-sn-glycero-3-phosphocholine (18:0 Diether PC),
[0118] 1-oleoyl-2-cholesterylhemisuccinoyl-sn-glycero-3-phosphocholine (OChemsPC),
[0119] 1-hexadecyl-sn-glycero-3-phosphocholine (C16 Lyso PC),
[0120] 1,2-dilinolenoyl-sn-glycero-3-phosphocholine,
[0121] 1,2-diarachidonoyl-sn-glycero-3-phosphocholine,
[0122] 1,2-didocosahexaenoyl-sn-glycero-3-phosphocholine,
[0123] 1,2-dioleoyl-sn-glycero-3-phosphoethanolamine (DOPE),
[0124] 1,2-diphytanoyl-sn-glycero-3-phosphoethanolamine (ME 16:0 PE),
[0125] 1,2-distearoyl-sn-glycero-3-phosphoethanolamine,
[0126] 1,2-dilinoleoyl-sn-glycero-3-phosphoethanolamine,
[0127] 1,2-dilinolenoyl-sn-glycero-3-phosphoethanolamine,
[0128] 1,2-diarachidonoyl-sn-glycero-3-phosphoethanolamine,
[0129] 1,2-didocosahexaenoyl-sn-glycero-3-phosphoethanolamine,
[0130] 1,2-dioleoyl-sn-glycero-3-phospho-rac-(1-glycerol) sodium salt (DOPG), sphingomyelin, and any mixtures thereof.

[0131] In some embodiments, the delivery agent further comprises a structural lipid. In some embodiments, the structural lipid is selected from the group consisting of cholesterol, fecosterol, sitosterol, ergosterol, campesterol, stigmasterol, brassicasterol, tomatidine, ursolic acid, alpha-tocopherol, and any mixtures thereof.

[0132] In some embodiments, the delivery agent further comprises a PEG lipid. In some embodiments, the PEG lipid is selected from the group consisting of a PEG-modified phosphatidylethanolanine, a PEG-modified phosphatidic acid, a PEG-modified ceramide, a PEG-modified dialkylamine, a PEG-modified diacylglycerol, a PEG-modified dialkylglycerol, and any mixtures thereof.

[0133] In some embodiments, the delivery agent further comprises an ionizable lipid selected from the group consisting of
[0134] 3-(didodecylamino)-N1,N1,4-tridodecyl-1-piperazineethanamine (KL10),
[0135] N1-[2-(didodecylamino)ethyl]-N1,N4,N4-tridodecyl-1,4-piperazinediethanamine (KL22), 14,25-ditridecyl-15,18,21,24-tetraaza-octatriacontane (KL25),
[0136] 1,2-dilinoleyloxy-N,N-dimethylaminopropane (DLin-DMA),
[0137] 2,2-dilinoleyl-4-dimethylaminomethyl-[1,3]-dioxolane (DLin-K-DMA),
[0138] heptatriaconta-6,9,28,31-tetraen-19-yl 4-(dimethylamino)butanoate (DLin-MC3-DMA), 2,2-dilinoleyl-4-(2-dimethylaminoethyl)-[1,3]-dioxolane (DLin-KC2-DMA),
[0139] 1,2-dioleyloxy-N,N-dimethylaminopropane (DODMA),
[0140] 2-({8-[(3β)-cholest-5-en-3-yloxy]octyl}oxy)-N,N-dimethyl-3-[(9Z,12Z)-octadeca-9,1 2-dien-1-yloxy]propan-1-amine (Octyl-CLinDMA),
[0141] (2R)-2-({8-[(3β)-cholest-5-en-3-yloxy]octyl}oxy)-N,N-dimethyl-3-[(9Z,12Z)-octadec
[0142] a-9,12-dien-1-yloxy]propan-1-amine (Octyl-CLinDMA (2R)), and (2S)-2-({8-[(3β)-cholest-5-en-3-yloxy]octyl}oxy)-N,N-dimethyl-3-[(9Z,12Z)-octadec a-9,12-dien-1-yloxy]propan-1-amine (Octyl-CLinDMA (2S)).

[0143] In some embodiments, the delivery agent further comprises a phospholipid, a structural lipid, a PEG lipid, or any combination thereof.

[0144] In some embodiments, the composition is formulated for in vivo delivery. In some embodiments, the composition is formulated for intramuscular, subcutaneous, or intradermal delivery.

[0145] The present disclosure also provides a host cell comprising a polynucleotide of the invention. In some embodiments, the host cell is a eukaryotic cell. The present disclosure also provides a vector comprising a polynucleotide of the invention. Also provided is a method of making a polynucleotide of the invention comprising synthesizing the polynucleotide enzymatically or chemically. The present disclosure also provides a polypeptide encoded by a polynucleotide of the invention, a composition comprising a polynucleotide of the invention, a host cell comprising a polynucleotide of the invention, a vector comprising a polynucleotide of the invention, or produced by the method of making disclosed herein.

[0146] In another aspect, the disclosure provides a pharmaceutical composition comprising any one of the preceding mRNAs or nanoparticles, e.g., lipid nanoparticles, and a pharmaceutically acceptable diluent, carrier or excipient.

[0147] In another aspect, the disclosure provides a method for inducing apoptosis in a cell, the method including contacting the cell with any one of the preceding mRNA constructs (e.g., modified mRNA constructs), or preceding nanoparticles (e.g., a lipid nanoparticle) or preceding pharmaceutical compositions, thereby inducing apoptosis. The contacting can occur in vitro or in vivo. In some embodiments, the cell is a cancer cell. In some embodiments, the cancer cell is a liver cancer cell. In some embodiments, the liver cancer cell is a hepatocellular carcinoma cell. In some embodiments, the cancer cell is a colorectal cancer cell. In some embodiments, the colorectal cancer cell is in a primary tumor or a metastasis. In some embodiments, the cancer cell is a hematopoietic cell. In some embodiments, the cancer cell is a myeloid cell. In some embodiments, the cancer cell is a hematopoietic stem cell (e.g., a hematopoetic stem cell from bone marrow, an erythroid stem cell, a myeloid stem cell, a thrombocytic stem cell). In any of the preceding embodiments, the cell may be a human cell.

[0148] In another aspect, the disclosure provides a method for treating a subject having cancer, the method including providing or administering an effective amount of any one of the preceding mRNA constructs (e.g., modified mRNA constructs), or preceding nanoparticles (e.g., a lipid nanoparticle) or preceding pharmaceutical compositions to the subject. In some embodiments, the cancer is liver cancer or colorectal cancer. In some embodiments, the liver cancer is hepatocellular carcinoma. In some embodiments, the colorectal cancer is a primary tumor or a metastasis. In some embodiments, the cancer is a hematopoietic cancer. In some embodiments, the cancer is an acute myeloid leukemia, a chronic myeloid leukemia, a chronic myelomonocytic leukemia, a myelodystrophic syndrome (including refractory anemias and refractory cytopenias) or a myeloproliferative neoplasm or disease (including polycythemia vera, essential thrombocytosis and primary myelofibrosis). In some embodiments, the lipid nanoparticle or isolated mRNA (or pharmaceutical composition) is administered to the patient parenterally.

[0149] In certain embodiments, the cell is also contacted with, or the subject is also provided with an mRNA that selectively inhibits MCL1, or a pharmaceutical composition comprising the mmRNA that selectively inhibits MCL1, wherein the mRNA in the pharmaceutical composition is optionally in a lipid nanoparticle. In certain embodiments, the mRNA that selectively inhibits MCL1 encodes an amino acid sequence selected from the group consisting of SEQ ID NOs: 117-126.

[0150] In another aspect, the disclosure provides a lipid nanoparticle encapsulating an modified mRNA of the invention, wherein the lipid nanoparticle comprises a cationic lipid, a PEG-modified lipid, a sterol and a non-cationic lipid. In one embodiment, the cationic lipid is selected from the group consisting of 2,2-dilinoleyl-4-methylaminoethyl-[1,3]-dioxolane (DLin-KC2-DMA), dilinoleyl-methyl-4-dimethylaminobutyrate (DLin-MC3-DMA) and di((Z)-non-2-en-1-yl) 9-((4-(dimethylamino)butanoyl)oxy)heptadecanedioate (L319). In one embodiment, the cationic lipid nanoparticle has a molar ratio of about 20-60% cationic lipid, about 5-25% non-cationic lipid, about 25-55% sterol and about 0.5-15% PEG-modified lipid. In one embodiment, the cationic lipid is an ionizable cationic lipid and the non-cationic lipid is a neutral lipi, and the sterol is cholesterol. In one embodiment, the the open reading frame of the encapsulated mmRNA is codon-optimized. In one embodiment, the nanoparticle has a polydiversity value of less than 0.4. In one embodiment, the nanoparticle has a net neutral charge at a neutral pH. In one embodiment, the nanoparticle has a mean diameter of 50-200 nm. In one embodiment, at least 80% of the uracils in the open reading frame of the encapsulated mmRNA have a chemical modification. In one embodiment, 100% of the uracils in the open reading frame of the encapsulated mmRNA have a chemical modification. In one embodiment, the chemical modification is in the 5-position of the uracils.

### BRIEF DESCRIPTION OF THE DRAWINGS

[0151] FIG. 1 is a photograph of a Western blot showing the results of Wheat Germ Lysate (WGL) cell free translation of mmRNA constructs encoding one BH3 domain (constructs 183532 and 183533) or three BH3 domains with intervening F2A linkers (construct 183534), demonstrating detection of mono-, di- and trimeric BH3 domain species by translation of the multimeric BH3 construct.

[0152] FIG. 2 is a graph showing that Hep3B human hepatocellular carcinoma cells transfected with mmRNA constructs encoding multimeric BH3 domains undergo apoptosis.

[0153] FIGS. 3A-3C are graphs showing that Hep3B human hepatocellular carcinoma cells transfected with lipid nanoparticles (LNPs) containing mmRNA constructs encoding multimeric BH3 domains undergo apoptosis. FIG. 3A shows results at 12 hours post-transfection using Caspase 3/7 reagent staining; FIG. 3B shows results at 24 hours post-transfection using Caspase 3/7 reagent staining; FIG. 3C shows results at 24 hours post transfection using Cell Titer Glo (CTG) assay.

[0154] FIG. 4 is a graph showing that Hep3B human hepatocellular carcinoma cells transfected with mmRNA constructs encoding a truncated BID protein (amino acids 61-195, including its BH3 domain) undergo apoptosis.

[0155] FIG. 5 is a graph showing that Hep3B human hepatocellular carcinoma cells transfected with mmRNA constructs encoding a truncated BID protein (amino acids 77-195, including its BH3 domain) undergo apoptosis.

[0156] FIGS. 6A-D are graphs showing the synergistic pro-apoptotic effect of targeting MCL1 in combination with SQT-PUMA-BH3 or SQT-Bad-BH3 in hepatocellular carcinoma cells (HCC) but not in primary hepatocytes. FIGS. 6A and 6C show Hep3B HCC cells. FIGS. 6B and 6D show primary hepatocytes. FIGS. 6A and 6B show SQT-PUMA-BH3. FIGS. 6C and 6D show SQT-Bad-BH3.

[0157] FIGS. 7A-B are bar graphs showing the synergistic pro-apoptotic effects of anti-MCL1 mRNA constructs in combination with SQT-PUMA-BH3. FIG. 7A shows anti-MCL1 mRNA at 50 ng. FIG. 7B shows anti-MCL mRNA at 12.5 ng.

[0158] FIG. 8 is a schematic diagram of the design of the indicated BH3 multimer constructs, as well as the SQT-PUMA-BH3 scaffolded construct and PUMA-BH3 monomer construct used as controls (top row). The middle row illustrates the final peptide expression products (shown after arrow) of the self-cleaving multimer constructs. The bottom row illustrates the multimer constructs containing GGGS linkers, which are not cleavable so these constructs remain as trimers or dimers following expression (shown after arrow).

[0159] FIG. 9 is a graph comparing the apoptosis of Hep3B human hepatocellular carcinoma cells transfected with mmRNA constructs encoding self-cleaving multimeric BH3 domain constructs (containing F2A or P2A cleavable linkers) or encoding uncleavable multimeric BH3 domain constructs (containing uncleavable GGGS linkers). Scaffolded SQT constructs were used as the positive (SQT-PUMA-BH3) and negative (SQT-dummy) controls.

[0160] FIG. 10 is a graph showing the apoptosis of Hep3B human hepatocellular carcinoma cells transfected with lipid nanoparticles (LNPs) containing an mmRNA construct encoding an uncleavable multimeric BH3 domain construct (containing uncleavable GGGS linkers), as compared to cells treated with the scaffolded SQT construct positive control (SQT-PUMA-BH3).

[0161] FIGS. 11A and 11B are bar graphs showing apoptosis of metastatic lymphoma HGC27 cells (FIG. 11A) and lung carcinoma A549 cells (FIG. 11B) following transfection of YAP inhibitory mRNA constructs into the cells.

[0162] FIG. 12 is a photograph of a Western blot analysis of immunoprecipitated cell lysates from metastatic lymphoma HGC27 cells transfected with YAP inhibitory mRNA constructs, demonstrating binding of YAP inhibitory constructs to TEAD4 transcription factor in the cells.

[0163] FIG. 13 is a bar graph showing relative mRNA levels of CTGF and CYR61 following transfection of YAP inhibitory mRNA constructs in HGC27 cells, as compared to cells treated with YAP-CMV plasmid or eGFP.

[0164] FIG. 14 provides images showing apoptosis of NCI-N87 cells via YOYO-3 staining, 72 hours after transfection with YAP inhibitory mRNA constructs, as compared to cells untreated or treated with scaffolded SQT construct positive control.

### DETAILED DESCRIPTION

[0165] Intracellular delivery of relatively small therapeutic polypeptides that can specifically bind to an intracellular target is one approach to modulate such intracellular targets. For example, inhibition of anti-apoptotic Bcl-2 family proteins in cancer cells may induce apoptosis in cancer cells, including cancer cells that are resistant to conventional chemotherapies. In principle, introduction of an mRNA encoding such a therapeutic polypeptide into the cell may lead to translation of the therapeutic polypeptide within the cell, allowing it to modulate its intracellular target(s). Delivery of mRNA encoding such a therapeutic polypeptide has advantages over other nucleic acid delivery approaches known in the art, such as viruses (e.g., retroviruses), because delivery of mRNA typically does not lead to integration of the nucleic acid into the host cell's genome, allowing transient expression of the nucleic acid. However, the delivery of therapeutic RNAs to cells is generally considered difficult, for example, due to the relative instability and low cell permeability of RNAs.

[0166] In some aspects, the disclosure provides compositions, such as isolated mRNAs encoding one or more intracellular binding peptides, such as BH3 domains. In some aspects, the mRNA construct encoding the intracellular binding peptide does not encode a scaffold polypeptide for presenting the peptide, since it has been determined for some intracellular binding peptides, such as BH3 domains, that such a scaffold polypeptide may not be necessary for the domain to function effectively, for example intracellularly, to modulate the activity of a target to which the domain(s) binds. In some embodiments, the isolated mRNAs encode multiple intracellular binding peptides, such as BH3 domains, referred to herein as multimer constructs. In some embodiments, the isolated mRNAs include one or more modified nucleobase and are referred to as modified mRNAs (mmRNAs).

[0167] In other aspects, the mmRNA encodes one or more intracellular binding peptides selected from the group consisting of: a TOPK inhibitory peptide, a SALL4 inhibitory peptide, a Ras inhibitory peptide, a p53 inhibitory peptide, a PP2a inhibitory peptide, a STAT3 inhibitory peptide and a YAP inhibitory peptide, wherein the intracellular binding peptide lacks a scaffold polypeptide, and wherein said mmRNA comprises one or more modified nucleobases. In other aspects, the mmRNA encodes one or more intracellular binding peptides selected from the group consisting of: a TOPK inhibitory peptide, a SALL4 inhibitory peptide, a Ras inhibitory peptide, a p53 inhibitory peptide, a PP2a inhibitory peptide, a STAT3 inhibitory peptide and a YAP inhibitory peptide, wherein the intracellular binding peptide is linked to a scaffold polypeptide, and wherein said mmRNA comprises one or more modified nucleobases. In some aspects, the mmRNA encodes at least three intracellular binding peptides (e.g., three YAP inhibitory peptides, three TOPK inhibitory peptides, three SALL4 inhibitory peptides, etc). In some aspects, the mmRNA encodes two to ten intracellular binding peptides. In some aspects, the mmRNA encodes at least one YAP inhibitory peptide, optionally two or three YAP binding peptides, operably linked via a peptide linker, optionally with a scaffold polypeptide.

[0168] In addition, the present disclosure provides nanoparticles, e.g., lipid nanoparticles, that contain mRNAs encoding one or more intracellular binding peptides, for example, BH3 domains, as well as pharmaceutical composition comprising any of these mRNAs or nanoparticles, e.g., lipid nanoparticles. The disclosure further provides methods of inducing apoptosis in a cell by contacting the cell with a composition of the disclosure (e.g., an isolated mRNA or a lipid nanoparticle). The disclosure also provides methods of treating a patient suffering from cancer that involve administration of a composition of the invention, e.g., in a pharmaceutical composition further comprising one or more pharmaceutically acceptable carriers, diluents or excipients.

### BH3 Domains

[0169] In various embodiments, an mRNA of the disclosure encodes one or more BH3 domains. In particular embodiments, an mRNA of the disclosure does not encode a scaffold polypeptide for presenting the BH3 domain(s); rather, expression of the one or more BH3 domains intracellularly is sufficient for their function. In particular embodiments, the isolated mRNAs encode multiple BH3 domains, referred to herein as multimer constructs. In one embodiment, the mRNA encodes at least three BH3 domains. In one embodiment, the mRNA encodes two to ten BH3 domains. In one embodiment, the mRNA encodes three BH3 domains. In other embodiments, the mRNA encodes 2, 4, 5, 6, 7, 8, 9 or 10 BH3 domains.

[0170] In some embodiments, the BH3 domain-encoding mRNA encodes an amino acid sequence of any one of SEQ ID NOs: 148, 149, 150, 159, 177, 185, 187, 188, 289 and 292. In some embodiments, the BH3 domain-encoding mRNA encodes an amino acid sequence of any one of SEQ ID NOs: 196, 197, 207, 225, 234, 236, 237, 291 and 294. In some embodiments, the BH3 domain-encoding mRNA comprises any one of SEQ ID NOs: 225, 244, 245, 246, 273, 281, 283, 284, 290 and 293.

[0171] When a construct contains multiple BH3 domains, the construct can contain multiple copies of the same BH3 domain or, alternatively, can contain a combination of two or more different BH3 domains. In certain embodiments, the BH3 domains are selected from the group consisting of PUMA BH3, Bim BH3, Bad BH3, Noxa BH3, truncated BID polypeptide containing a BH3 domain, and combinations thereof.

[0172] In some embodiments, the BH3 domain is a human BH3 domain. In other embodiments, the BH3 domain may be from a non-human species, e.g., Caenorhabditis elegans, rodents (e.g., mice and rats), or non-human primates. Typically, a BH3 domain is derived from a pro-apoptotic Bcl-2 family member, including from an effector pro-apoptotic Bcl-2 family member (e.g., BAK or BAX) or from a BH3-only family member (e.g., BID, BIM, BAD, BIK, BMF, bNIP3, HRK, Noxa, and PUMA). In particular embodiments, the BH3 domain is a BH3 domain derived from a BH3-only family member. Without wishing to be bound by theory, it is known in the art that the balance of pro-apoptotic Bcl-2 family proteins and anti-apoptotic Bcl-2 family proteins in a cell is important for regulation of apoptosis. Structural studies have shown that the BH3 domain of BH3-only proteins can bind as an amphipathic helix in a surface-exposed hydrophobic groove of an anti-apoptotic Bcl-2 family member (see, for example, Day et al., J. Mol. Biol. 380:958-971, 2008). The invention features methods of inducing apoptosis that involve introducing an mRNA encoding one or more BH3 domains into a cell under conditions permissive for expression of the one or more BH3 domains.

[0173] In some embodiments, a BH3 domain may directly bind to a Bcl-2 family protein. For example, in some embodiments, a BH3 domain may directly bind to a pro-apoptotic Bcl-2 family protein. In some embodiments, the pro-apoptotic Bcl-2 family protein is Bax and/or Bak. In some embodiments, a BH3 domain may directly interact with an anti-apoptotic Bcl-2 family protein. In some embodiments, the anti-apoptotic Bcl-2 family protein may BCL-2, BCL-XL, BCL-w, MCL-1 or BCL2-related protein A1 (BCL2A1).

[0174] In some embodiments, a BH3 domain is derived from a BH3-only family member. In some embodiments, a BH3 domain as used herein may include an amino acid sequence having at least about 60% (e.g., about 60%, about 62%, about 64%, about 66%, about 68%, about 70%, about 72%, about 74%, about 76%, about 78%, about 80%, about 82%, about 84%, about 86%, about 88%, about 90%, about 92%, about 94%, about 96%, about 98%, or about 99%) identity to the amino acid sequence of X₁X₂X₃X₄X₅X₆X₇X₈X₉DX₁₀X₁₁X₁₂, wherein X₁, X₅, X₈, and X₁₁ are, independently, any hydrophobic residue, X₂ and X₉ are, independently, Gly, Ala, or Ser, X₃, X₄, X₆, and X₇ are, independently, any amino acid residue, X₁₀ is Asp or Glu, and X₁₂ is Asn, His, Asp, or Tyr. In some embodiments, a hydrophobic residue is Leu, Ala, Val, Ile, Pro, Phe, Met or Trp. In some embodiments, X₅ is Leu.

[0175] In some embodiments, a BH3 domain as used herein may include an amino acid sequence having at least about 60% (e.g., about 60%, about 62%, about 64%, about 66%, about 68%, about 70%, about 72%, about 74%, about 76%, about 78%, about 80%, about 82%, about 84%, about 86%, about 88%, about 90%, about 92%, about 94%, about 96%, about 98%, or about 99%) identity to any one of SEQ ID NOs: 1-26. In some embodiments, the BH3 domain includes an amino acid sequence selected from the group consisting of SEQ ID NOs: 1-26, as shown in Table 1, which also indicates the name, UniProt sequence identifier, and amino acid residues. Illustrative BH3 domains that may be used according to the present invention are also described in Lomonosova and Chinnadurai, Oncogene (2009) 27, S2-S19, which is hereby incorporated by reference in its entirety.

TABLE 1
Illustrative BH3 Domains

| SEQ | | |
|---|---|---|
| ID | BH3 Domain | |
| NO | Sequence | Source Protein (UniProt) |
| 1 | LALRLACIGDEMDVS | BIK>Q13323\|57-71 |
| 2 | EKAELLQGGDLLRQR | BNIP1>Q12981\|110-124 |
| 3 | VESILKKNSDWIWDW | BNIP3>Q12983\|106-120 |
| 4 | EVEALKKSADWVSDW | BNIP3L>O60238\|120-134 |
| 5 | TAARLKALGDELHQR | HRK>O00198\|33-47 |
| 6 | IAQELRRIGDEFNAY | BIMe1>O43521\|148-162 |
| 7 | YGRELRRMSDEFVDS | BAD>Q92934\|110-124 |
| 8 | IARHLAQVGDSMDRS | BID>P55957\|86-100 |
| 9 | IARKLQCIADQFHRL | BMF>Q96LC9\|133-147 |
| 10 | CATQLRRFGDKLNFR | NOXA>Q13794\|25-39 |
| 11 | IGAQLRRMADDLNAQ | PUMA>Q9BXH1\|137-151 |
| 12 | LSRRLKVTGDLFDIM | Beclin1>Q11457\|112-126 |
| 13 | IVELLKYSGDQLERK | BCL-Gs>Q9BZR8-2\|212-226 |
| 14 | ALETLRRVGDGVQRN | MCL-1S>Q07820-2\|209-223 |
| 15 | IGSKLAAMCDDFDAQ | EGL-1>O61667\|69-83 |
| 16 | IGRKLTVMCDEFDSE | CED-13>Q9TYO6\|55-69 |
| 17 | NIRRLRALADGVQKV | ApoLl>O14791\|154-168 |
| 18 | NIDKLRALADDIDKT | ApoL6>Q9BWW8\|56-70 |
| 19 | MVTLLPIEGQEIHFF | BRCC2>Q8IZY5\|1-115 |
| 20 | PTVPLPSETDGYVAP | HER2>P04626\|1116-1130 |
| 21 | PQRYLVIQGDDRMKL | HER4>Q1503\|981-995 |
| 22 | TVGELSRALGHENGS | MAP1>Q96BY2\|116-130 |
| 23 | VGQLLQDMGDDVYQQ | MULE>Q7Z6X7\|1976-1990 |
| 24 | LHEVLNGLLDRPDWE | SPHK2>Q9NRA0\|250-264 |
| 25 | AVHSLSRIGDELYLE | RAD9>Q99638\|16-30 |
| 26 | NPKFLKNAGRDCSRR | TGM2>P21980\|200-214 |

[0176] In some embodiments, the BH3 domain may include an amino acid sequence having at least about 60% (e.g., about 60%, about 62%, about 64%, about 66%, about 68%, about 70%, about 72%, about 74%, about 76%, about 78%, about 80%, about 82%, about 84%, about 86%, about 88%, about 90%, about 92%, about 94%, about 96%, about 98%, or about 99%) identity to any one of SEQ ID NOs: 27-30. In some embodiments, the BH3 domain includes the amino acid sequence of any one of SEQ ID NOs: 27-30. In some embodiments, the BH3 domain includes the amino acid sequence of SEQ ID NO: 27. In some embodiments, the BH3 domain includes the amino acid sequence of SEQ ID NO: 28. Illustrative BH3 domains that may be used according to the present invention are described in Stadler et al, Cell Death and Disease (2014) 5, e1037, 1-9, which is hereby incorporated by reference in its entirety. The BH3 domain of Puma has the amino acid sequence: EEQWAREIGAQLRRMADDLNAQYERR (SEQ ID NO: 27); the BH3 domain of Bim has the amino acid sequence: DMRPEIWIAQELRRIGDEFNAYYARR (SEQ ID NO: 28); the BH3 domain of Bad has the amino acid sequence: NLWAAQRYGRELRRMSDEFVDSFKKG (SEQ ID NO: 29); and the BH3 domain of Noxa has the amino acid sequence: PAELEVECATQLRRFGKLNFRQKLL (SEQ ID NO: 30).

[0177] In some embodiments, the BH3 domain-encoding mRNA encodes an amino acid sequence selected from the group consisting of SEQ ID NOs: 196, 197, 207, 225, 234, 236, 237, 291 and 294. In some embodiments, the BH3 domain-encoding mRNA comprises any one of SEQ ID NOs: 225, 244, 245, 246, 273, 281, 283, 284, 290 and 293.

[0178] In another embodiment, the mRNA construct encodes one or more truncated BID polypeptides that retain the Bcl-2 homology 3 (BH3) domain. The truncated BID polypeptide containing a BH3 domain contains fewer amino acid residues than a full-length BID protein but still contain the BH3 domain. For example, in one embodiment, the truncated BID (tBID) polypeptide containing its BH3 domain consists of amino acids 61-195 of the BID protein. In another embodiment, the truncated BID (tBID) polypeptide containing its BH3 domain consists of amino acids 77-195 of the BID protein. Non-limiting examples of tBID constructs, and representative sequences thereof, are described further in Example 4.

[0179] In some embodiments, a BH3 domain may be able to induce apoptosis. A person of ordinary skill in the art can readily determine if a BH3 domain is able to induce apoptosis using a variety of methods, for example, caspase activation assays (e.g., caspase-3/7 activation assays), stains and dyes (e.g., CELLTOX™, MITOTRACKER® Red, propidium iodide, and YOYO3), cell viability assays, cell morphology, and PARP-1 cleavage.

### TOPK-Inhibitory Peptides

[0180] In various embodiments, an mRNA of the disclosure encodes one or more inhibitory peptides of T-lymphokine-activated killer cell-originated protein kinase (TOPK). TOPK is critical for mitosis of breast cancer cells (see, e.g, Matsuo et al., Science Translation Medicine, 6(259): 259ra145, and U.S. Pat. No. 8,673,548). Consequently, TOPK-inhibitory peptides of the invention can be used to treat or prevent cancer.

[0181] In particular embodiments, an mRNA of the disclosure encodes a scaffold polypeptide for presenting the TOPK-inhibitory peptides. In other embodiments, an mRNA of the disclosure does not encode a scaffold polypeptide; rather, expression of the one or more TOPK-inhibitory peptides intracellularly is sufficient for their function. In particular embodiments, the isolated mRNAs encode multiple TOPK-inhibitory peptides, referred to herein as multimer or tandem constructs. In one embodiment, the mRNA encodes at least three TOPK-inhibitory peptides. In one embodiment, the mRNA encodes two to ten TOPK-inhibitory peptides. In one embodiment, the mRNA encodes three TOPK-inhibitory peptides. In other embodiments, the mRNA encodes 2, 4, 5, 6, 7, 8, 9 or 10 TOPK-inhibitory peptides. The mRNA may encode a linker as described herein.

[0182] When a construct contains multiple TOPK-inhibitory peptides, the construct can contain multiple copies of the same TOPK-inhibitory peptide or, alternatively, can contain a combination of two or more different TOPK-inhibitory peptides. In certain embodiments, the TOPK-inhibitory peptide is selected from SEQ ID NOs: 372-378.

[0183] In some embodiments, a TOPK-inhibitory peptide as used herein may include an amino acid sequence having at least about 60% (e.g., about 60%, about 62%, about 64%, about 66%, about 68%, about 70%, about 72%, about 74%, about 76%, about 78%, about 80%, about 82%, about 84%, about 86%, about 88%, about 90%, about 92%, about 94%, about 96%, about 98%, or about 99%) identity to any one of SEQ ID NOs: 376-378. In some embodiments, a peptide or tandem construct may have any one of the following sequences in Table or in the Sequence Listing but for having at least 1, 2, or 3 substitutions, C-terminal or N-terminal additions or deletions as compared to said sequences.

[0184] In some embodiments, the TOPK-inhibitory peptide includes an amino acid sequence selected from the group consisting of SEQ ID NOs: 376-378, as shown in Table 2, which also indicates the name and amino acid residues.

TABLE 2
Illustrative TOPK-inhibitory peptides and Tandem Constructs

| SEQ | | |
|---|---|---|
| ID NO | Sequence | Description |
| 372 | TCAAGCTTTTGGACCCTCGTACAGAAGCTAATACGACTCAC | TandemPep. |
| | TATAGGGAAATAAGAGAGAAAAGAAGAGTAAGAAGAAATA | TOPK_ |
| | TAAGAGCCACCATGATGGAAGGAATCAGCAACTTCAAGAC | codon |
| | CCCATCCAAGCTGTCCGAGAAGAAAAAGGGTTCCGGAGTG | optimized |
| | AAGCAGACCCTGAACTTCGATCTGCTCAAGCTCGCCGGGGA | (5′ UTR, |
| | CGTGGAAAGCAACCCTGGTCCCATGGAGGGCATCTCGAACT | ORF, 3′ |
| | TTAAGACCCCCTCGAAGCTTTCGGAGAAGAAGAAGGGATCC | UTR) |
| | GGCGTCAAGCAGACTCTGAATTTCGACTTGCTGAAGCTCGC | |
| | GGGCGATGTGGAATCAAACCCGGGGCCTATGGAAGGCATCT | |
| | CCAACTTCAAAACTCCGTCCAAGCTGAGCGAGAAAAAGAA | |
| | GGGAAAGCCCATTCCGAACCCTCTGCTGGGACTGGACAGCA | |
| | CCTGATAATAGGCTGGAGCCTCGGTGGCCATGCTTCTTGCC | |
| | CCTTGGGCCTCCCCCCAGCCCCTCCTCCCCTTCCTGCACCCG | |
| | TACCCCCGTGGTCTTTGAATAAAGTCTGAGTGGGCGGC | |
| 373 | TCAAGCTTTTGGACCCTCGTACAGAAGCTAATACGACTCAC | TandemPep. |
| | TATAGGGAAATAAGAGAGAAAAGAAGAGTAAGAAGAAATA | TOPK |
| | TAAGAGCCACCATGATGGAAGGCATCAGCAACTTCAAGACC | (5′ UTR, |
| | CCAAGCAAGCTGAGCGAGAAGAAGAAGGGCTCCGGCGTGA | ORF, 3′ |
| | AGCAGACCTTGAACTTCGACCTGCTCAAACTTGCCGGCGAC | UTR) |
| | GTGGAGAGCAACCCCGGCCCCATGGAGGGGATCAGTAACTT | |
| | CAAGACCCCCAGCAAGCTGAGCGAGAAGAAGAAGGGTAGC | |
| | GGCGTGAAACAGACCCTGAATTTCGATCTGCTGAAGCTGGC | |
| | CGGCGACGTGGAGAGCAACCCCGGCCCCATGGAGGGCATA | |
| | AGCAATTTCAAGACCCCCAGCAAGCTGAGCGAAAAGAAAA | |
| | AGGGCAAGCCCATTCCCAACCCCCTTCTGGGCCTTGACAGC | |
| | ACCTGATAATAGGCTGGAGCCTCGGTGGCCATGCTTCTTGC | |
| | CCCTTGGGCCTCCCCCCAGCCCCTCCTCCCCTTCCTGCACCC | |
| | GTACCCCCGTGGTCTTTGAATAAAGTCTGAGTGGGCGGC | |
| 374 | ATGATGGAAGGAATCAGCAACTTCAAGACCCCATCCAAGCT | TandemPep. |
| | GTCCGAGAAGAAAAAGGGTTCCGGAGTGAAGCAGACCCTG | TOPK_ |
| | AACTTCGATCTGCTCAAGCTCGCCGGGGACGTGGAAAGCAA | codon |
| | CCCTGGTCCCATGGAGGGCATCTCGAACTTTAAGACCCCCT | optimized |
| | CGAAGCTTTCGGAGAAGAAGAAGGGATCCGGCGTCAAGCA | (ORF) |
| | GACTCTGAATTTCGACTTGCTGAAGCTCGCGGGCGATGTGG | |
| | AATCAAACCCGGGGCCTATGGAAGGCATCTCCAACTTCAAA | |
| | ACTCCGTCCAAGCTGAGCGAGAAAAAGAAGGGAAAGCCCA | |
| | TTCCGAACCCTCTGCTGGGACTGGACAGCACC | |
| 375 | ATGATGGAAGGCATCAGCAACTTCAAGACCCCAAGCAAGCT | TandemPep. |
| | GAGCGAGAAGAAGAAGGGCTCCGGCGTGAAGCAGACCTTG | TOPK |
| | AACTTCGACCTGCTCAAACTTGCCGGCGACGTGGAGAGCAA | (ORF) |
| | CCCCGGCCCCATGGAGGGGATCAGTAACTTCAAGACCCCCA | |
| | GCAAGCTGAGCGAGAAGAAGAAGGGTAGCGGCGTGAAACA | |
| | GACCCTGAATTTCGATCTGCTGAAGCTGGCCGGCGACGTGG | |
| | AGAGCAACCCCGGCCCCATGGAGGGCATAAGCAATTTCAA | |
| | GACCCCCAGCAAGCTGAGCGAAAAGAAAAAGGGCAAGCCC | |
| | ATTCCCAACCCCCTTCTGGGCCTTGACAGCACC | |
| 376 | MEGISNFKTPSKLSEKKK | Isolated |
| | | TOPK |
| | | inhibitory |
| | | peptide |
| 377 | MMEGISNFKTPSKLSEKKKGSGVKQTLNFDLLKLAGDVESNP | TOPK |
| | GPMEGISNFKTPSKLSEKKKGSGVKQTLNFDLLKLAGDVESNP | inhibitory |
| | GPMEGISNFKTPSKLSEKKKGKPIPNPLLGLDST | 3-peptide |
| | | tandem with |
| | | F2A linker |
| 378 | MMEGISNFKTPSKLSEKKKGSGATNFSLLKQAGDVEENPGPM | TOPK |
| | EGISNFKTPSKLSEKKKGSGATNFSLLKQAGDVEENPGPMEGIS | inhibitory |
| | NFKTPSKLSEKKKGKPIPNPLLGLDST | 3-peptide |
| | | tandem with |
| | | P2A linker |

[0185] In some embodiments, a TOPK-inhibitory peptide may be able to inhibit cell proliferation. A person of ordinary skill in the art can readily determine if a TOPK-inhibitory peptide is able to inhibit cell proliferation using a variety of methods known in the art.

### SALL4-Inhibitory Peptides

[0186] In various embodiments, an mRNA of the disclosure encodes one or more SALL4-inhibitory peptides. SALL4 encodes a zinc-finger transcription factor that is not normally expressed in adult tissue but is expressed in a subset of hepatocellular carcinomas (WO2013043128; Yong, New Engl. J. Med. 368:2266-2276, 2013). Consequently, SALL4-inhibitory peptides of the disclosure may be used to treat or prevent cancer.

[0187] In particular embodiments, an mRNA of the disclosure encodes a scaffold polypeptide for presenting the SALL4-inhibitory peptides. In other embodiments, an mRNA of the disclosure does not encode a scaffold polypeptide; rather, expression of the one or more SALL4-inhibitory peptides intracellularly is sufficient for their function. In particular embodiments, the isolated mRNAs encode multiple SALL4-inhibitory peptides, referred to herein as multimer or tandem constructs. In one embodiment, the mRNA encodes at least three SALL4-inhibitory peptides. In one embodiment, the mRNA encodes two to ten SALL4-inhibitory peptides. In one embodiment, the mRNA encodes three SALL4-inhibitory peptides. In other embodiments, the mRNA encodes 2, 4, 5, 6, 7, 8, 9 or 10 SALL4-inhibitory peptides. The mRNA may encode a linker as described herein.

[0188] When a construct contains multiple SALL4-inhibitory peptides, the construct can contain multiple copies of the same SALL4-inhibitory peptide or, alternatively, can contain a combination of two or more different SALL4-inhibitory peptides. In certain embodiments, the SALL4-inhibitory peptide is selected from SEQ ID NOs: 379-385.

[0189] In some embodiments, a SALL4-inhibitory peptide as used herein may include an amino acid sequence having at least about 60% (e.g., about 60%, about 62%, about 64%, about 66%, about 68%, about 70%, about 72%, about 74%, about 76%, about 78%, about 80%, about 82%, about 84%, about 86%, about 88%, about 90%, about 92%, about 94%, about 96%, about 98%, or about 99%) identity to any one of SEQ ID NOs: 383-385. In some embodiments, a peptide or tandem construct may have any one of the following sequences in Table 3 or in the Sequence Listing but for having at least 1, 2, or 3 substitutions, C-terminal or N-terminal additions or deletions as compared to said sequences.

[0190] In some embodiments, the SALL4-inhibitory peptide includes an amino acid sequence selected from the group consisting of SEQ ID NOs: 383-385, as shown in Table 3, which also indicates the name and amino acid residues.

TABLE 3
Illustrative SALL4-inhibitory Peptides and Tandem Constructs

| SEQ ID | | |
|---|---|---|
| NO | Sequence | Description |
| 379 | TCAAGCTTTTGGACCCTCGTACAGAAGCTAATACGAC | TandemPep.Sall4, |
| | TCACTATAGGGAAATAAGAGAGAAAAGAAGAGTAAG | (5′ UTR, ORF, 3′ |
| | AAGAAATATAAGAGCCACCATGATGAGCAGACGTAA | UTR) |
| | GCAGGCTAAGCCCCAGCATATCGGCAGCGGCGTGAA | |
| | GCAGACCCTGAACTTCGACCTGCTCAAGCTGGCCGGC | |
| | GATGTCGAGTCAAACCCCGGCCCCATGAGCAGAAGA | |
| | AAGCAGGCCAAGCCCCAGCACATCGGTAGCGGAGTG | |
| | AAACAGACCCTGAACTTCGACTTACTGAAGCTCGCTG | |
| | GCGACGTGGAGAGCAACCCCGGCCCCATGAGCAGAA | |
| | GAAAGCAGGCCAAGCCCCAGCACATCGGAAAGCCCA | |
| | TCCCCAACCCCCTGCTGGGCCTGGACAGCACCTGATA | |
| | ATAGGCTGGAGCCTCGGTGGCCATGCTTCTTGCCCCT | |
| | TGGGCCTCCCCCCAGCCCCTCCTCCCCTTCCTGCACCC | |
| | GTACCCCCGTGGTCTTTGAATAAAGTCTGAGTGGGCG | |
| | GC | |
| 380 | TCAAGCTTTTGGACCCTCGTACAGAAGCTAATACGAC | TandemPep.Sall4 |
| | TCACTATAGGGAAATAAGAGAGAAAAGAAGAGTAAG | codon optimized |
| | AAGAAATATAAGAGCCACCATGATGAGCCGCAGAAA | (5′ UTR, ORF, 3′ |
| | GCAGGCCAAGCCTCAGCATATCGGATCCGGCGTGAA | UTR) |
| | GCAGACCCTGAACTTCGACCTTCTGAAGCTGGCCGGC | |
| | GATGTGGAATCCAACCCGGGGCCCATGTCCCGGAGG | |
| | AAACAAGCGAAGCCACAGCACATCGGATCGGGAGTG | |
| | AAGCAAACTCTCAACTTCGACTTGCTGAAACTCGCCG | |
| | GGGATGTCGAGTCAAATCCCGGCCCTATGAGCCGCC | |
| | GGAAGCAGGCTAAGCCGCAGCACATTGGAAAGCCTA | |
| | TCCCCAACCCGCTGCTGGGTCTGGACAGCACCTGATA | |
| | ATAGGCTGGAGCCTCGGTGGCCATGCTTCTTGCCCCT | |
| | TGGGCCTCCCCCCAGCCCCTCCTCCCCTTCCTGCACCC | |
| | GTACCCCCGTGGTCTTTGAATAAAGTCTGAGTGGGCG | |
| | GC | |
| 381 | ATGATGAGCAGACGTAAGCAGGCTAAGCCCCAGCAT | TandemPep.Sall4 |
| | ATCGGCAGCGGCGTGAAGCAGACCCTGAACTTCGAC | (ORF) |
| | CTGCTCAAGCTGGCCGGCGATGTCGAGTCAAACCCCG | |
| | GCCCCATGAGCAGAAGAAAGCAGGCCAAGCCCCAGC | |
| | ACATCGGTAGCGGAGTGAAACAGACCCTGAACTTCG | |
| | ACTTACTGAAGCTCGCTGGCGACGTGGAGAGCAACC | |
| | CCGGCCCCATGAGCAGAAGAAAGCAGGCCAAGCCCC | |
| | AGCACATCGGAAAGCCCATCCCCAACCCCCTGCTGG | |
| | GCCTGGACAGCACC | |
| 382 | ATGATGAGCCGCAGAAAGCAGGCCAAGCCTCAGCAT | TandemPep.Sall4 |
| | ATCGGATCCGGCGTGAAGCAGACCCTGAACTTCGAC | codon optimized |
| | CTTCTGAAGCTGGCCGGCGATGTGGAATCCAACCCGG | (ORF) |
| | GGCCCATGTCCCGGAGGAAACAAGCGAAGCCACAGC | |
| | ACATCGGATCGGGAGTGAAGCAAACTCTCAACTTCG | |
| | ACTTGCTGAAACTCGCCGGGGATGTCGAGTCAAATCC | |
| | CGGCCCTATGAGCCGCCGGAAGCAGGCTAAGCCGCA | |
| | GCACATTGGAAAGCCTATCCCCAACCCGCTGCTGGGT | |
| | CTGGACAGCACC | |
| 383 | MSRRKQAKPQHI | isolated SALL4- |
| | | inhibitory peptide |
| 384 | MMSRRKQAKPQHIGSGVKQTLNFDLLKLAGDVESNPG | SALL4-inhibitory |
| | PMSRRKQAKPQHIGSGVKQTLNFDLLKLAGDVESNPGP | 3-peptide tandem |
| | MSRRKQAKPQHIGKPIPNPLLGLDST | with F2A linker |
| 385 | MMSRRKQAKPQHIGSGATNFSLLKQAGDVEENPGPMS | SALL4-inhibitory |
| | RRKQAKPQHIGSGATNFSLLKQAGDVEENPGPMSRRKQ | 3-peptide tandem |
| | AKPQHIGKPIPNPLLGLDST | with P2A linker |

[0191] In some embodiments, a SALL4-inhibitory peptide may be able to inhibit cell proliferation. A person of ordinary skill in the art can readily determine if a SALL4-inhibitory peptide is able to inhibit cell proliferation using a variety of methods known in the art.

### Ras Inhibitory Peptides and Constructs

[0192] In various embodiments, an mRNA of the disclosure encodes one or more Ras inhibitory peptides or Ras inhibitory peptide constructs (e.g., multimers of Ras inhibitory peptides). It is known in the art that unregulated activity of RAS gene products can cause cancer (see, e.g., Goodsell, D S Oncologist 4: 263-4, 1999). Anti-Ras peptide ligands which bind Ras have been described (see, e.g., Gareiss, P C ChemBioChem 11: 517-522, 2010). Thus, the invention features methods of altering Ras activity to treat or prevent cancer.

[0193] In some embodiments, an mRNA of the disclosure encodes a scaffold polypeptide for presenting the Ras inhibitory peptide. In other embodiments, a scaffold polypeptide is not necessary; rather, expression of the one or more Ras inhibitory peptides intracellularly is sufficient for their function, e.g., expression of a multimer of Ras inhibitory peptide.

[0194] In particular embodiments, the isolated mRNAs encode multiple Ras inhibitory peptides, referred to herein as a multimer or tandem construct. In one embodiment, the mRNA encodes at least three Ras inhibitory peptides. In one embodiment, the mRNA encodes two to ten Ras inhibitory peptides. In one embodiment, the mRNA encodes three Ras inhibitory peptides. In other embodiments, the mRNA encodes 2, 4, 5, 6, 7, 8, 9 or 10 Ras inhibitory peptides. In some embodiments, the multimer construct encodes one or more linkers as described herein.

[0195] When a construct contains multiple Ras inhibitory peptides, the construct can contain multiple copies of the same Ras inhibitory peptide or, alternatively, can contain a combination of two or more different Ras inhibitory peptides. In certain embodiments, the Ras inhibitory peptides are selected from the group consisting of SEQ ID NOs: 386-392.

[0196] In some embodiments, a Ras inhibitory peptide or multimer construct as used herein may include an amino acid sequence having at least about 60% (e.g., about 60%, about 62%, about 64%, about 66%, about 68%, about 70%, about 72%, about 74%, about 76%, about 78%, about 80%, about 82%, about 84%, about 86%, about 88%, about 90%, about 92%, about 94%, about 96%, about 98%, or about 99%) identity to any one of SEQ ID NOs: 386-388. In some embodiments, a Ras inhibitory peptide or multimer construct may have any one of the following sequences in Table 4 or in the Sequence Listing but for having at least 1, 2, or 3 substitutions, C-terminal or N-terminal additions or deletions as compared to said sequences.

[0197] In some embodiments, the Ras inhibitory peptide includes an amino acid sequence selected from the group consisting of SEQ ID NOs: 386-388, as shown in Table 4, which also indicates the name and amino acid residues.

TABLE 4
Illustrative Ras Inhibitory Peptides
and Tandem Constructs

| SEQ | | |
|---|---|---|
| ID NO | Sequence | Description |
| 386 | HYPWFKARLYPL | RAS |
| | | inhibitory |
| | | peptide |
| 387 | MHYPWFKARLYPLGSGVKQTLNFDLLKLAG | Ras |
| | DVESNPGPHYPWFKARLYPLGSGVKQTLNF | inhibitory |
| | DLLKLAGDVESNPGPHYPWFKARLYPLGKP | peptide |
| | IPNPLLGLDST | tandem-(3x) |
| | | (GSG)F2A |
| | | linker-V5 |
| | | Tag |
| | | (optional) |
| 388 | MHYPWFKARLYPLGSGATNFSLLKQAGDVE | Ras |
| | ENTGPHYPWFKARLYPLGSGATNFSLIKQA | inhibitory |
| | GDVEENPGPHYPWFKARLYPLGKPIPNPLL | peptide |
| | GLDST | tandem-(3x) |
| | | (GSG) |
| | | P2A linker- |
| | | V5 Tag |
| | | (optional) |

* (GSG) residues can be absent or present, e.g., added to the 5′ end of the peptide to improve cleavage efficiency

[0198] In some embodiments, a Ras inhibitory peptide or construct may be able to alter cell growth and proliferation. A person of ordinary skill in the art can readily determine if an anti-Ras peptide is able to affect cell growth and proliferation using a variety of methods known in the art.

### p53 Inhibitory Peptides

[0199] In various embodiments, an mRNA of the disclosure encodes one or more p53 inhibitory peptides. p53 is a tumor suppressor (see, e.g., Surget S et al., OncoTargets and Therapy 7: 57-68, 2013) implicated is a wide range of proliferative and/or tumorogenic disorders, in particular, cancer. Consequently, p53-inhibitory peptides of the invention can be used to treat or prevent proliferative and/or tumorogenic disorders, in particular, cancer.

[0200] In particular embodiments, an mRNA of the disclosure encodes a scaffold polypeptide for presenting the p53-inhibitory peptides. In other embodiments, an mRNA of the disclosure does not encode a scaffold polypeptide; rather, expression of the one or more p53-inhibitory peptides intracellularly is sufficient for their function. In particular embodiments, the isolated mRNAs encode multiple p53-inhibitory peptides, referred to herein as multimer or tandem constructs. In one embodiment, the mRNA encodes at least three p53-inhibitory peptides. In one embodiment, the mRNA encodes two to ten p53-inhibitory peptides. In one embodiment, the mRNA encodes three p53-inhibitory peptides. In other embodiments, the mRNA encodes 2, 4, 5, 6, 7, 8, 9 or 10 p53-inhibitory peptides. The mRNA may encode a linker as described herein.

[0201] When a construct contains multiple p53-inhibitory peptides, the construct can contain multiple copies of the same p53-inhibitory peptide or, alternatively, can contain a combination of two or more different p53-inhibitory peptides. In certain embodiments, the p53-inhibitory peptide is selected from SEQ ID NOs: 393-424.

[0202] In some embodiments, the p53-inhibitory peptide is a biologically-active portion, isolated from human p53. In exemplary aspects of the invention, the p53-inhibitory peptide (also referred to herein as a p53-inhibitory domain) is obtained from a full-length or naturally-occurring p53 protein or polypeptide, wherein the peptide or domain lacks the full function of p53, e.g., a functionality and/or biological activity attributed to one or more p53 domains/peptides distinct from said inhibitory domain function. In other embodiments, the p53-inhibitory peptide may be from a non-human species, e.g., Caenorhabditis elegans, rodents (e.g., mice and rats), or non-human primates. In some embodiments, a p53-inhibitory peptide as used herein may include an amino acid sequence having at least about 60% (e.g., about 60%, about 62%, about 64%, about 66%, about 68%, about 70%, about 72%, about 74%, about 76%, about 78%, about 80%, about 82%, about 84%, about 86%, about 88%, about 90%, about 92%, about 94%, about 96%, about 98%, or about 99%) identity to any one of SEQ ID NOs: 393-404. In some embodiments, a peptide or multimer construct may have any one of the following sequences in Table 5 or in the Sequence Listing but for having at least 1, 2, or 3 substitutions, C-terminal or N-terminal additions or deletions as compared to said sequences.

[0203] In some embodiments, the p53-inhibitory peptide includes an amino acid sequence selected from the group consisting of SEQ ID NOs: 393-404, as shown in Table 5, which also indicates the name and amino acid residues.

TABLE 5
Illustrative p53-inhibitory peptides and
Tandem Constructs

| SEQ | | |
|---|---|---|
| ID NO | p53-inhibitory sequence | Description |
| 393 | METFSDLWKLLPEGSGVKQTLNFDLLKLAGDVESNP | TandemPep.P53 |
| | GPETFSDLWKLLPEGSGVKQTLNFDLLKLAGDVESNP | ORF |
| | GPETFSDLWKLLPEGKPIPNPLLGLDST | |
| 394 | MLTFEHSWAQLTSGSGVKQTLNFDLLKLAGDVESNP | TandemPep.p53.6S |
| | GPLTFEHSWAQLTSGSGVKQTLNFDLLKLAGDVESNP | ORF |
| | GPLTFEHSWAQLTSGKPIPNPLLGLDST | |
| 395 | METFEHWWAQLTSGSGVKQTLNFDLLKLAGDVESNP | TandemPep.p53. |
| | GPETFEHWWAQLTSGSGVKQTLNFDLLKLAGDVESN | P1E6W |
| | PGPETFEHWWAQLTSGKPIPNPLLGLDST | |
| 396 | MLTFEHWWAQLTSGSGVKQTLNFDLLKLAGDVESNP | TandemPep.p53.P6W |
| | GPLTFEHWWAQLTSGSGVKQTLNFDLLKLAGDVESN | ORF |
| | PGPLTFEHWWAQLTSGKPIPNPLLGLDST | |
| 397 | METFEHWWSQLLSGSGVKQTLNFDLLKLAGDVESNP | TandemPep.p53.pDIQ |
| | GPETFEHWWSQLLSGSGVKQTLNFDLLKLAGDVESN | ORF |
| | PGPETFEHWWSQLLSGKPIPNPLLGLDST | |
| 398 | MTSFAEYWNLLSPGSGVKQTLNFDLLKLAGDVESNP | TandemPep.p53.pMI |
| | GPTSFAEYWNLLSPGSGVKQTLNFDLLKLAGDVESNP | ORF |
| | GPTSFAEYWNLLSPGKPIPNPLLGLDST | |
| 399 | TSFAEYWNLLSP | pMI |
| 400 | ETFSDLWKLLPE | p53 |
| 401 | ETFEHWWSQLLS | pDIQ |
| 402 | ETFEHWWAQLTS | p1E6W |
| 403 | LTFEHSWAQLTS | p536S |
| 404 | LTFEHWWAQLTS | P6W |

[0204] In some embodiments, a p53-inhibitory peptide may be able to inhibit cell proliferation. A person of ordinary skill in the art can readily determine if a p53-inhibitory peptide is able to inhibit cell proliferation using a variety of methods known in the art.

### PP2A Inhibitory Peptides

[0205] In various embodiments, an mRNA of the disclosure encodes one or more PP2A inhibitory peptides. PP2A is a serine/threonine phosphatase that modulates the activity of proteins in several oncogenic signaling cascades (see, e.g., Kurimchak and Graña, Cell Cycle 14:18-30, 2015). Consequently, PP2A-inhibitory peptides of the disclosure can be used to treat or prevent proliferative and/or tumorigenic disorders, in particular, cancer.

[0206] In particular embodiments, an mRNA of the disclosure encodes a scaffold polypeptide for presenting the PP2A-inhibitory peptides. In other embodiments, an mRNA of the disclosure does not encode a scaffold polypeptide; rather, expression of the one or more PP2A-inhibitory peptides intracellularly is sufficient for their function. In particular embodiments, the isolated mRNAs encode multiple PP2A-inhibitory peptides, referred to herein as multimer or tandem constructs. In one embodiment, the mRNA encodes at least three PP2A-inhibitory peptides. In one embodiment, the mRNA encodes two to ten PP2A-inhibitory peptides. In one embodiment, the mRNA encodes three PP2A-inhibitory peptides. In other embodiments, the mRNA encodes 2, 4, 5, 6, 7, 8, 9 or 10 PP2A-inhibitory peptides. The mRNA may encode a linker as described herein.

[0207] When a construct contains multiple PP2A-inhibitory peptides, the construct can contain multiple copies of the same PP2A-inhibitory peptide or, alternatively, can contain a combination of two or more different PP2A-inhibitory peptides. In certain embodiments, the PP2A-inhibitory peptide is selected from SEQ ID NOs: 425-442.

[0208] In some embodiments, the PP2A-inhibitory peptide is a biologically-active portion, isolated from human PP2A. In exemplary aspects of the disclosure, the PP2A-inhibitory peptide (also referred to herein as a PP2A-inhibitory domain) is obtained from a full-length or naturally-occurring PP2A protein or polypeptide, wherein the peptide or domain lacks the full function of PP2A, e.g., a functionality and/or biological activity attributed to one or more PP2A domains/peptides distinct from said inhibitory domain function. In other embodiments, the PP2A-inhibitory peptide may be from a non-human species, e.g., Caenorhabditis elegans, rodents (e.g., mice and rats), or non-human primates. In some embodiments, a PP2A-inhibitory peptide as used herein may include an amino acid sequence having at least about 60% (e.g., about 60%, about 62%, about 64%, about 66%, about 68%, about 70%, about 72%, about 74%, about 76%, about 78%, about 80%, about 82%, about 84%, about 86%, about 88%, about 90%, about 92%, about 94%, about 96%, about 98%, or about 99%) identity to any one of SEQ ID NOs: 425-432. In some embodiments, a peptide or multimer construct may have any one of the following sequences in Table 6 or in the Sequence Listing but for having at least 1, 2, or 3 substitutions, C-terminal or N-terminal additions or deletions as compared to said sequences.

[0209] In some embodiments, the PP2A-inhibitory peptide includes an amino acid sequence selected from the group consisting of SEQ ID NOs: 425-432, as shown in Table 6, which also indicates the name and amino acid residues.

TABLE 6
Illustrative PP2A-inhibitory peptides
and Tandem Constructs

| SEQ | | |
|---|---|---|
| ID NO | Sequence | Description |
| 425 | MTPDYFLGSGVKQTLNFDLLKLAGDVES | TandemPep. |
| | NPGPTPDYFLGSGVKQTLNFDLLKLAGD | PP2aB56 |
| | VESNPGPTPDYFLGKPIPNPLLGLDST | alpha |
| 426 | MVKKKKIKREIKIFRGRSRFRGRSRGSG | TandemPep. |
| | VKQTLNFDLLLAGDVESNPGPVKKKKIK | PP2aDP7, |
| | REIKIFRGRSRFRGRSRGSGVKQTLNFD | ORF |
| | LLKLAGDVESNPGPVKKKKIKREIKIFR | |
| | GRSRFRGRSRGKPIPNPLLGLDST | |
| 427 | MRQKRLIRQKRLIRQKRLIGSGVKQTLN | TandemPep. |
| | FDLLKLAGDVESNPGPRQKRLIRQKRLI | PP2aDPT 2 |
| | RQKRLIGSGVKQTLNFDLLKLAGDVESN | |
| | PGPRQKRLIRQKRLIRQKRLIGKPIPNP | |
| | LLGLDST | |
| 428 | MVKKKKIKREIKIPRRPGPTRKHYQPYA | TandemPep. |
| | GSGVKQTLNFDLLKLAGDVESNPGPVKK | PP2aDPT5 |
| | KKIKREIKIPRRPGPTRKHYQPYAGSGV | ORF |
| | KQTLNFDLLKLAGDVESNPGPVKKKKIK | |
| | REIKIPRRPGPTRKHYQPYAGKPIPNPL | |
| | LGLDST | |
| 429 | TPDYFL | PP2aB56alpha |
| 430 | VKKKKIKREIKIFRGRSRFRGRSR | PP2aDP7 |
| 431 | RQKRLIRQKRLIRQKRLI | PP2aDPT2 |
| 432 | VKKKKIKREIKIPRRPGPTRKHYQPYA | PP2aDPT5 |

[0210] In some embodiments, a PP2A-inhibitory peptide may be able to inhibit cell proliferation. A person of ordinary skill in the art can readily determine if a PP2A-inhibitory peptide is able to inhibit cell proliferation using a variety of methods known in the art.

### STAT3 Inhibitory Peptides

[0211] In various embodiments, an mRNA of the disclosure encodes one or more STAT3 inhibitory peptides. STAT3 is a transcription factor, and alterations in its activity, such as loss of function, gain of function, or constitutive activation, are associated with recurrent infections, disordered bone and tooth development, auto-immune diseases, and various cancers (see, e.g., Levy D E, Loomis C A, The New England Journal of Medicine 357: 1655-1658, 2007; Milner J D et al., Blood 125: 591-9, 2015; Klampfer L Current Cancer Drug Targets 6: 107-121, 2006; Alvarez J V et al., Cancer Research 66: 3162-3168, 2006; Yin W et al., Molecular Cancer 5: 15. doi:10.1186/1476-4598-5-15, 2006; Kusaba T et al., Oncology Reports 15: 1445-51. doi:10.3892/or.15.6.1445, 2006). Consequently, STAT3-inhibitory peptides of the disclosure can be used to treat or prevent proliferative and/or tumorigenic disorders, in particular, cancer, and auto-immune diseases and infection.

[0212] In particular embodiments, an mRNA of the disclosure encodes a scaffold polypeptide for presenting the STAT3-inhibitory peptides. In other embodiments, an mRNA of the disclosure does not encode a scaffold polypeptide; rather, expression of the one or more STAT3-inhibitory peptides intracellularly is sufficient for their function. In particular embodiments, the isolated mRNAs encode multiple STAT3-inhibitory peptides, referred to herein as multimer or tandem constructs. In one embodiment, the mRNA encodes at least three STAT3-inhibitory peptides. In one embodiment, the mRNA encodes two to ten STAT3-inhibitory peptides. In one embodiment, the mRNA encodes three STAT3-inhibitory peptides. In other embodiments, the mRNA encodes 2, 4, 5, 6, 7, 8, 9 or 10 STAT3-inhibitory peptides. The mRNA may encode a linker as described herein.

[0213] When a construct contains multiple STAT3-inhibitory peptides, the construct can contain multiple copies of the same STAT3-inhibitory peptide or, alternatively, can contain a combination of two or more different STAT3-inhibitory peptides. In certain embodiments, the STAT3-inhibitory peptide is selected from SEQ ID NOs: 443-447.

[0214] In some embodiments, the STAT3-inhibitory peptide is a biologically-active portion, isolated from human STAT3. In exemplary aspects of the invention, the STAT3-inhibitory peptide (also referred to herein as a STAT3-inhibitory domain) is obtained from a full-length or naturally-occurring STAT3 protein or polypeptide, wherein the peptide or domain lacks the full function of STAT3, e.g., a functionality and/or biological activity attributed to one or more STAT3 domains/peptides distinct from said inhibitory domain function. In other embodiments, the STAT3-inhibitory peptide may be from a non-human species, e.g., Caenorhabditis elegans, rodents (e.g., mice and rats), or non-human primates. In some embodiments, a STAT3-inhibitory peptide as used herein may include an amino acid sequence having at least about 60% (e.g., about 60%, about 62%, about 64%, about 66%, about 68%, about 70%, about 72%, about 74%, about 76%, about 78%, about 80%, about 82%, about 84%, about 86%, about 88%, about 90%, about 92%, about 94%, about 96%, about 98%, or about 99%) identity to any one of SEQ ID NOs: 443 and 444. In some embodiments, a peptide or tandem construct may have any one of the following sequences in Table 7 or in the Sequence Listing but for having at least 1, 2, or 3 substitutions, C-terminal or N-terminal additions or deletions as compared to said sequences.

[0215] In some embodiments, the STAT3-inhibitory peptide includes an amino acid sequence selected from the group consisting of SEQ ID NOs: 443 and 444, as shown in Table 7, which also indicates the name and amino acid residues.

TABLE 7
Illustrative STAT3-inhibitory peptides
and Tandem Constructs

| SEQ | | |
|---|---|---|
| ID NO | Sequence | Description |
| 443 | MPLTAVFWLIYVLAKALVTVCGSGVKQTLNFDL | TandemPep. |
| | LKLAGDVESNPGPPLTAVFWLIYVLAKALVTVC | STAT3.DBD |
| | GSGVKQTLNFDLLKLAGDVESNPGPPLTAVFWL | ORF |
| | IYVLAKALVTVCGKPIPNPLLGLDST | |
| 444 | PLTAVFWLIYVLAKALVTVC | STAT3 |

[0216] In some embodiments, a STAT3-inhibitory peptide may be able to inhibit cell proliferation. A person of ordinary skill in the art can readily determine if a STAT3-inhibitory peptide is able to inhibit cell proliferation using a variety of methods known in the art.

### YAP Binding Polypeptides

[0217] In various embodiments, an mRNA of the disclosure encodes one or more YAP binding polypeptides, also referred to as YAP inhibitory domains. YAP is a transcription factor regulated by the Hippo pathway, and alterations in its activity, such as gain in function, are associated with various cancers (see, e.g., Yu, et al., Cell. Vol. 163(4):811-28, 2015; Yimlamai, D., et al., J Hepatol. Vol. 63(6):1491-501, 2015). The Hippo pathway controls several cell functions central to tumorigenesis, e.g., cell proliferation and apoptosis, and is deregulated in several human cancers. The main function of the Hippo pathway is to negatively regulate the activity of YAP. When the Hippo pathway is on, YAP is degraded and a VGLL family member (including VGLL1-4) binds to TEAD1-TEAD4, downregulating downstream genes. When the Hippo pathway is off, YAP binds to TEAD1-TEAD4, inducing transcription of downstream genes. Consequently, YAP binding polypeptides of the disclosure can be used to treat or prevent proliferative and/or tumorigenic disorders, in particular, cancer.

[0218] In particular embodiments, an mRNA of the disclosure encodes a scaffold polypeptide for presenting YAP inhibitory domains. In other embodiments, an mRNA of the disclosure does not encode a scaffold polypeptide for presenting the YAP inhibitory domain(s); rather, expression of the one or more YAP inhibitory domains intracellularly is sufficient for their function. In particular embodiments, the isolated mRNAs encode multiple YAP inhibitory domains, referred to herein as multimer or tandem constructs. In one embodiment, the mRNA encodes at least three YAP inhibitory domains. In one embodiment, the mRNA encodes two to ten YAP inhibitory domains. In one embodiment, the mRNA encodes three YAP inhibitory domains. In other embodiments, the mRNA encodes 2, 3, 4, 5, 6, 7, 8, 9 or 10 YAP inhibitory domains.

[0219] When a construct contains multiple YAP inhibitory domains, the construct can contain multiple copies of the same YAP inhibitory domain or, alternatively, can contain a combination of two or more different YAP inhibitory domains. When YAP is not bound to a transcript via TEAD1-4 binding, to induce target genes, a VGLL family member (including VGLL1-4) is bound. Specifically, VGLL tondu (TDU) domains (TDU1 and TDU2) bind to TEAD4 (Jiao, S., et al. Cancer Cell, Vol. 25(2): 166-80, 2014 Feb. 10). In certain embodiments, the YAP inhibitory domains are selected from the group consisting of VGLL1, VGLL2, VGLL3, or VGLL4, and combinations thereof. In certain embodiments, the YAP inhibitory domain is selected from SEQ ID NOs: 448-544.

[0220] In some embodiments, a YAP inhibitory domain contains domains from both VGLL4 and YAP. In some embodiments, the YAP inhibitory domain contains fragments of TEADs binding regions from VGLL4 and YAP. In certain embodiments, the YAP inhibitory domain has a polyGGS linker between the fragments of TEADs binding regions from VGLL4 and YAP. In certain embodiments the YAP inhibitory domain is the Super-TDU as described in Jiao, S., et al. (Cancer Cell, Vol. 25: 166-180 (2014), herein incorporated by reference).

[0221] In some embodiments, the YAP inhibitory domain is a human YAP inhibitory domain. In other embodiments, the YAP inhibitory domain may be from a non-human species, e.g., Caenorhabditis elegans, rodents (e.g., mice and rats), or non-human primates. Typically, an YAP inhibitory domain is derived from a VGLL family member. The invention features methods of inducing apoptosis that involve introducing an mRNA encoding one or more YAP inhibitory domains into a cell under conditions permissive for expression of the one or more YAP inhibitory domains. In some embodiments, an YAP inhibitory domain may directly bind to a YAP family member.

[0222] In some embodiments, an YAP inhibitory domain as used herein may include an amino acid sequence having at least about 60% (e.g., about 60%, about 62%, about 64%, about 66%, about 68%, about 70%, about 72%, about 74%, about 76%, about 78%, about 80%, about 82%, about 84%, about 86%, about 88%, about 90%, about 92%, about 94%, about 96%, about 98%, or about 99%) identity to any one of SEQ ID NOs: 448-462. In some embodiments, a peptide or multimer construct may have any one of the following sequences in Table 8 or in the Sequence Listing but for having at least 1, 2, or 3 substitutions, C-terminal or N-terminal additions or deletions as compared to said sequences.

[0223] In some embodiments, the mRNA that selectively inhibits YAP encodes an amino acid sequence selected from the group consisting of: SEQ ID NOs: 481, 483, 488, 490 and 498. In some embodiments, the mRNA that selectively inhibits YAP comprises any one of SEQ ID NOs: 508, 510, 515, 517, 518 and 519.

[0224] In some embodiments, the YAP inhibitory domain includes an amino acid sequence selected from the group consisting of SEQ ID NOs: 448-462, as shown in Table 8, which also indicates the name and amino acid residues.

TABLE 8
Illustrative YAP Binding Polypeptides and
Scaffold Constructs

| SEQ ID | | Source |
|---|---|---|
| NO | | Protein |
| 448 | SVDDHFAKSLGDTWLQIGGSGNPKTANVPQTVPMRLRKLPDS | Super TDU |
| | FFKPPE | |
| 449 | SVDDHFAKSLGDTWLQIGGSGNPKTANVPQTVPARLRKLPDS | Super TDU |
| | AFKPPE | (MF2A) |
| 450 | SVDDAAAKSLGDTWLQIGGSGNPKTANVPQTVPARLRKLPDS | Super TDU |
| | AFKPPE | (HFMF4A) |
| 451 | DPVVEEHFRRSLGKNYKEPEPAPNSVSITGSVDDHFAKALGD | Human |
| | TWLQIKAAKD | VGLL4- |
| | | TDU 1 and |
| | | 2 |
| 452 | QTLPVASALSSHRTGPPPISPSKRKFSMEPGDEDLDCDNDHVS | Human |
| | KMSRIFNPHLNKTANGDCRRDPRERSRSPIERAVAPTMSLHGS | VGLL4 |
| | HLYTSLPSLGLEQPLALTKNSLDASRPAGLSPTLTPGERQQNR | |
| | PSVITCASAGARNCNLSHCPIAHSGCAAPGPASYRRPPSAATT | |
| | CDPVVEEHFRRSLGKNYKEPEPAPNSVSITGSVDDHFAKALG | |
| | DTWLQIKAAKDGASSSPESASRRGQPASPSAHMVSHSHSPSV | |
| | VS | |
| 453 | MQTLPVASALSSHRTGPPPISPSKRKFSMEPGDEDLDCDNDHV | Human |
| | SKMSRIFNPHLNKTANGDCRRDPRERSRSPIERAVAPTMSLHG | VGLL4 |
| | SHLYTSLPSLGLEQPLALTKNSLDASRPAGLSPTLTPGERQQN | (complete) |
| | RPSVITCASAGARNCNLSHCPIAHSGCAAPGPASYRRPPSAAT | |
| | TCDPVVEEHFRRSLGKNYKEPEPAPNSVSITGSVDDHFAKALG | |
| | DTWLQIKAAKDGASSSPESASRRGQPASPSAHMVSHSHSPSV | |
| | VS | |
| 454 | QTLPVASALSSHRTGPPPISPSKRKFSMEPGDEDLDCDNDHVS | Human |
| | KMSRlFNPHLNKTANGDCRRDPRERSRSPIERAVAPTMSLHGS | VGLL4 |
| | HLYTSLPSLGLEQPLALTKNSLDASRPAGLSPTLTPGERQQNR | (HF4A) |
| | PSVITCASAGARNCNLSHCPIAHSGCAAPGPASYRRPPSAATT | |
| | CDPVVEEAARRSLGKNYKEPEPAPNSVSITGSVDDAAAKALG | |
| | DTWLQIKAAKDGASSSPESASRRGQPASPSAHMVSHSHSPSV | |
| | VS | |
| 455 | MQTLPVASALSSHRTGPPPISPSKRKFSMEPGDEDLDCDNDHV | Human |
| | SKMSRIFNPHLNKTANGDCRRDPRERSRSPIERAVAPTMSLHG | VGLL4 |
| | SHLYTSLPSLGLEQPLALTKNSLDASRPAGLSPTLTPGERQQN | (HF4A) |
| | RPSVITCASAGARNCNLSHCPIAHSGCAAPGPASYRRPPSAAT | (complete) |
| | TCDPVVEEAARRSLGKNYKEPEPAPNSVSITGSVDDAAAKAL | |
| | GDTWLQIKAAKDGASSSPESASRRGQPASPSAHMVSHSHSPS | |
| | VVS | |
| 456 | DPVVEEHFRRSLGKNYK | VGLL4 |
| | | TDU 1 (V1) |
| 457 | DPVVEEHFRRSLGKNYKE | VGLL4 |
| | | TDU 1 (V2) |
| 458 | DPVVEEHFRRSLGKNYKEPE | VGLL4 |
| | | TDU 1 (V3) |
| 459 | SVSITGSVDDHFAKALGDTWLQIK | VGLL4 |
| | | TDU 2 (V1) |
| 460 | SVSITGSVDDHFAKALGDTWLQIKA | VGLL4 |
| | | TDU 2 (V2) |
| 461 | SVSITGSVDDHFAKALGDTWLQIKAAKD | VGLL4 |
| | | TDU 2 (V3) |
| 462 | SVDDHFAKSLGDTWLQI | VGL44 |
| | | Super TDU |

[0225] In some embodiments, an YAP inhibitory domain can induce apoptosis. A person of ordinary skill in the art can readily determine if an YAP inhibitory domain is able to induce apoptosis using a variety of methods, for example, caspase activation assays (e.g., caspase-3/7 activation assays), stains and dyes (e.g., CELLTOX™, MITOTRACKER® Red, propidium iodide, and YOYO3), cell viability assays, cell morphology, and PARP-1 cleavage.

### Linkers and Cleavable Peptides

[0226] In certain embodiments, the mRNAs of the disclosure encode more than one intracellular binding domain (e.g., BH3 domain), referred to herein as multimer constructs. In certain embodiments of the multimer constructs, the mRNA further encodes a linker located between each domain. The linker can be, for example, a cleavable linker or protease-sensitive linker. In certain embodiments, the linker is selected from the group consisting of F2A linker, P2A linker, T2A linker, E2A linker, and combinations thereof. This family of self-cleaving peptide linkers, referred to as 2A peptides, has been described in the art (see for example, Kim, J. H. et al. (2011) PLoS ONE 6:e18556). In certain embodiments, the linker is an F2A linker. In certain embodiments, the linker is a GGGS linker. In certain embodiments, the multimer construct contains three domains with intervening linkers, having the structure: domain-linker-domain-linker-domain e.g., BH3 domain-linker-BH3 domain-linker-BH3 domain.

[0227] In one embodiment, the cleavable linker is an F2A linker (e.g., having the amino acid sequence shown in SEQ ID NO: 138). In other embodiments, the cleavable linker is a T2A linker (e.g., having the amino acid sequence shown in SEQ ID NO: 139), a P2A linker (e.g., having the amino acid sequence shown in SEQ ID NO: 140) or an E2A linker (e.g., having the amino acid sequence shown in SEQ ID NO: 141). The skilled artisan will appreciate that other art-recognized linkers may be suitable for use in the constructs of the invention (e.g., encoded by the polynucleotides of the invention). The skilled artisan will likewise appreciate that other multicistronic constructs may be suitable for use in the invention. In exemplary embodiments, the construct design yields approximately equimolar amounts of intrabody and/or domain thereof encoded by the constructs of the invention.

[0228] In one embodiment, the self-cleaving peptide may be, but is not limited to, a 2A peptide. A variety of 2A peptides are known and available in the art and may be used, including e.g., the foot and mouth disease virus (FMDV) 2A peptide, the equine rhinitis A virus 2A peptide, the Thosea asigna virus 2A peptide, and the porcine teschovirus-1 2A peptide. 2A peptides are used by several viruses to generate two proteins from one transcript by ribosome-skipping, such that a normal peptide bond is impaired at the 2A peptide sequence, resulting in two discontinuous proteins being produced from one translation event. As a non-limiting example, the 2A peptide may have the protein sequence: GSGATNFSLLKQAGDVEENPGP (SEQ ID NO: 35), fragments or variants thereof. In one embodiment, the 2A peptide cleaves between the last glycine and last proline. As another non-limiting example, the polynucleotides of the present invention may include a polynucleotide sequence encoding the 2A peptide having the protein sequence GSGATNFSLLKQAGDVEENPGP (SEQ ID NO: 35) fragments or variants thereof. One example of a polynucleotide sequence encoding the 2A peptide is: GGAAGCGGAGCTACTAACTTCAGCCTGCTGAAGCAGGCTGGAGACGTGGAGGAG AACCCTGGACCT (SEQ ID NO: 36). In one illustrative embodiment, a 2A peptide is encoded by the following sequence: 5′-TCCGGACTCAGATCCGGGGATCTCAAAATTGTCGCTCCTGTCAAACAAACTCTTA ACTTTGATTTACTCAAACTGGCTGGGGATGTAGAAAGCAATCCAGGTCCACTC-3′(SEQ ID NO: 37). The polynucleotide sequence of the 2A peptide may be modified or codon optimized by the methods described herein and/or are known in the art.

[0229] In one embodiment, this sequence may be used to separate the coding regions of two or more polypeptides of interest. As a non-limiting example, the sequence encoding the F2A peptide may be between a first coding region A and a second coding region B (A-F2Apep-B). The presence of the F2A peptide results in the cleavage of the one long protein between the glycine and the proline at the end of the F2A peptide sequence (NPGP is cleaved to result in NPG and P) thus creating separate protein A (with 21 amino acids of the F2A peptide attached, ending with NPG) and separate protein B (with 1 amino acid, P, of the F2A peptide attached). Likewise, for other 2A peptides (P2A, T2A and E2A), the presence of the peptide in a long protein results in cleavage between the glycine and proline at the end of the 2A peptide sequence (NPGP is cleaved to result in NPG and P). Protein A and protein B may be the same or different peptides or polypeptides of interest. In particular embodiments, protein A and protein B are a BH3 domain(s), and a Bcl-2-like polypeptide, in either order. In certain embodiments, the first coding region and the second coding region encode a BH3 domain(s) and a Bcl-2-like polypeptide, in either order.

mRNA

[0230] The disclosure provides isolated mRNAs, for example, mRNAs that encode one or more BH3 domains, as well as mRNAs that encode a Bcl-2-like polypeptide or a variant or fragment thereof. In some embodiments, an isolated mRNA of the invention encodes on or more intracellular binding domains described herein. In certain embodiments, an isolated mRNA of the invention encodes both one or more BH3 domains, and the Bcl-2-like polypeptide or variant or fragment thereof.

[0231] An mRNA may be a naturally or non-naturally occurring mRNA. An mRNA may include one or more modified nucleobases, nucleosides, or nucleotides, as described below, in which case it may be referred to as a “modified mRNA” or “mmRNA.” As described herein “nucleoside” is defined as a compound containing a sugar molecule (e.g., a pentose or ribose) or derivative thereof in combination with an organic base (e.g., a purine or pyrimidine) or a derivative thereof (also referred to herein as “nucleobase”). As described herein, “nucleotide” is defined as a nucleoside including a phosphate group.

[0232] An mRNA may include a 5′ untranslated region (5′-UTR), a 3′ untranslated region (3′-UTR), and/or a coding region (e.g., an open reading frame). An mRNA may include any suitable number of base pairs, including tens (e.g., 10, 20, 30, 40, 50, 60, 70, 80, 90 or 100), hundreds (e.g., 200, 300, 400, 500, 600, 700, 800, or 900) or thousands (e.g., 1000, 2000, 3000, 4000, 5000, 6000, 7000, 8000, 9000, 10,000) of base pairs. Any number (e.g., all, some, or none) of nucleobases, nucleosides, or nucleotides may be an analog of a canonical species, substituted, modified, or otherwise non-naturally occurring. In certain embodiments, all of a particular nucleobase type may be modified.

[0233] In some embodiments, an mRNA as described herein may include a 5′ cap structure, a chain terminating nucleotide, optionally a Kozak sequence (also known as a Kozak consensus sequence), a stem loop, a polyA sequence, and/or a polyadenylation signal.

[0234] A 5′ cap structure or cap species is a compound including two nucleoside moieties joined by a linker and may be selected from a naturally occurring cap, a non-naturally occurring cap or cap analog, or an anti-reverse cap analog (ARCA). A cap species may include one or more modified nucleosides and/or linker moieties. For example, a natural mRNA cap may include a guanine nucleotide and a guanine (G) nucleotide methylated at the 7 position joined by a triphosphate linkage at their 5′ positions, e.g., m⁷G(5′)ppp(5′)G, commonly written as m⁷GpppG. A cap species may also be an anti-reverse cap analog. A non-limiting list of possible cap species includes m⁷GpppG, m⁷Gpppm⁷G, m⁷3′dGpppG, m₂^{7,O3′}GpppG, m₂^{7,O3′}GppppG, m₂^{7,O2′}GppppG, m⁷Gpppm⁷G, m⁷3′dGpppG, m₂^{7,O3′}GpppG, m₂^{7,O3′}GppppG, and m₂^{7,O2′}GppppG.

[0235] An mRNA may instead or additionally include a chain terminating nucleoside. For example, a chain terminating nucleoside may include those nucleosides deoxygenated at the 2′ and/or 3′ positions of their sugar group. Such species may include 3′-deoxyadenosine (cordycepin), 3′-deoxyuridine, 3′-deoxycytosine, 3′-deoxyguanosine, 3′-deoxythymine, and 2′,3′-dideoxynucleosides, such as 2′,3′-dideoxyadenosine, 2′,3′-dideoxyuridine, 2′,3′-dideoxycytosine, 2′,3′-dideoxyguanosine, and 2′,3′-dideoxythymine. In some embodiments, incorporation of a chain terminating nucleotide into an mRNA, for example at the 3′-terminus, may result in stabilization of the mRNA, as described, for example, in International Patent Publication No. WO 2013/103659.

[0236] An mRNA may instead or additionally include a stem loop, such as a histone stem loop. A stem loop may include 2, 3, 4, 5, 6, 7, 8, or more nucleotide base pairs. For example, a stem loop may include 4, 5, 6, 7, or 8 nucleotide base pairs. A stem loop may be located in any region of an mRNA. For example, a stem loop may be located in, before, or after an untranslated region (a 5′ untranslated region or a 3′ untranslated region), a coding region, or a polyA sequence or tail. In some embodiments, a stem loop may affect one or more function(s) of an mRNA, such as initiation of translation, translation efficiency, and/or transcriptional termination.

[0237] An mRNA may instead or additionally include a polyA sequence and/or polyadenylation signal. A polyA sequence may be comprised entirely or mostly of adenine nucleotides or analogs or derivatives thereof. A polyA sequence may be a tail located adjacent to a 3′ untranslated region of an mRNA. In some embodiments, a polyA sequence may affect the nuclear export, translation, and/or stability of an mRNA.

[0238] An mRNA may instead or additionally include a microRNA binding site.

[0239] In some embodiments, an mRNA is a bicistronic mRNA comprising a first coding region and a second coding region with an intervening sequence comprising an internal ribosome entry site (IRES) sequence that allows for internal translation initiation between the first and second coding regions, or with an intervening sequence encoding a self-cleaving peptide, such as a 2A peptide. IRES sequences and 2A peptides are typically used to enhance expression of multiple proteins from the same vector. A variety of IRES sequences are known and available in the art and may be used, including, e.g., the encephalomyocarditis virus IRES.

Modified mRNAs

[0240] In some embodiments, an mRNA of the invention comprises one or more modified nucleobases, nucleosides, or nucleotides (termed “modified mRNAs” or “mmRNAs”). In some embodiments, modified mRNAs may have useful properties, including enhanced stability, intracellular retention, enhanced translation, and/or the lack of a substantial induction of the innate immune response of a cell into which the mRNA is introduced, as compared to a reference unmodified mRNA. Therefore, use of modified mRNAs may enhance the efficiency of protein production, intracellular retention of nucleic acids, as well as possess reduced immunogenicity.

[0241] In some embodiments, an mRNA includes one or more (e.g., 1, 2, 3 or 4) different modified nucleobases, nucleosides, or nucleotides. In some embodiments, an mRNA includes one or more (e.g., 1, 2, 3, 4, 5, 6, 7, 8, 9, 10, 20, 30, 40, 50, 60, 70, 80, 90, 100, or more) different modified nucleobases, nucleosides, or nucleotides. In some embodiments, the modified mRNA may have reduced degradation in a cell into which the mRNA is introduced, relative to a corresponding unmodified mRNA.

[0242] In some embodiments, the modified nucleobase is a modified uracil. Exemplary nucleobases and nucleosides having a modified uracil include pseudouridine (ψ), pyridin-4-one ribonucleoside, 5-aza-uridine, 6-aza-uridine, 2-thio-5-aza-uridine, 2-thio-uridine (s²U), 4-thio-uridine (s⁴U), 4-thio-pseudouridine, 2-thio-pseudouridine, 5-hydroxyuridine (ho⁵U), 5-aminoallyl-uridine, 5-halo-uridine (e.g., 5-iodo-uridineor 5-bromo-uridine), 3-methyl-uridine (m³U), 5-methoxy-uridine (mo⁵U), uridine 5-oxyacetic acid (cmo⁵U), uridine 5-oxyacetic acid methyl ester (memo⁵U), 5-carboxymethyl-uridine (cm⁵U), 1-carboxymethyl-pseudouridine, 5-carboxyhydroxymethyl-uridine (chm⁵U), 5-carboxyhydroxymethyl-uridine methyl ester (mchm⁵U), 5-methoxycarbonylmethyl-uridine (mcm⁵U), 5-methoxycarbonylmethyl-2-thio-uridine (mcm⁵s²U), 5-aminomethyl-2-thio-uridine (nm⁵s²U), 5-methylaminomethyl-uridine (mnm⁵U), 5-methylaminomethyl-2-thio-uridine (mnm⁵s²U), 5-methylaminomethyl-2-seleno-uridine (mnm⁵se²U), 5-carbamoylmethyl-uridine (ncm⁵U), 5-carboxymethylaminomethyl-uridine (cmnm⁵U), 5-carboxymethylaminomethyl-2-thio-uridine (cmnm⁵s²U), 5-propynyl-uridine, 1-propynyl-pseudouridine, 5-taurinomethyl-uridine (τm⁵U), 1-taurinomethyl-pseudouridine, 5-taurinomethyl-2-thio-uridine(im⁵s²U), 1-taurinomethyl-4-thio-pseudouridine, 5-methyl-uridine (m⁵U, i.e., having the nucleobase deoxythymine), 1-methyl-pseudouridine (m¹ψ), 5-methyl-2-thio-uridine (m⁵s²U), 1-methyl-4-thio-pseudouridine (m¹s⁴ψ), 4-thio-1-methyl-pseudouridine, 3-methyl-pseudouridine (m³ψ), 2-thio-1-methyl-pseudouridine, 1-methyl-1-deaza-pseudouridine, 2-thio-1-methyl-1-deaza-pseudouridine, dihydrouridine (D), dihydropseudouridine, 5,6-dihydrouridine, 5-methyl-dihydrouridine (m⁵D), 2-thio-dihydrouridine, 2-thio-dihydropseudouridine, 2-methoxy-uridine, 2-methoxy-4-thio-uridine, 4-methoxy-pseudouridine, 4-methoxy-2-thio-pseudouridine, N1-methyl-pseudouridine, 3-(3-amino-3-carboxypropyl)uridine (acp³U), 1-methyl-3-(3-amino-3-carboxypropyl)pseudouridine (acp³ ψ), 5-(isopentenylaminomethyl)uridine (inm⁵U), 5-(isopentenylaminomethyl)-2-thio-uridine (inm⁵₂U), α-thio-uridine, 2′-O-methyl-uridine (Um), 5,2′-O-dimethyl-uridine (m⁵Um), 2′-O-methyl-pseudouridine (ψm), 2-thio-2′-O-methyl-uridine (s²Um), 5-methoxycarbonylmethyl-2′-O-methyl-uridine (mcm⁵Um), 5-carbamoylmethyl-2′-O-methyl-uridine (ncm⁵Um), 5-carboxymethylaminomethyl-2′-O-methyl-uridine (cmnm⁵Um), 3,2′-O-dimethyl-uridine (m³Um), and 5-(isopentenylaminomethyl)-2′-O-methyl-uridine (inm⁵Um), 1-thio-uridine, deoxythymidine, 2′-F-ara-uridine, 2′-F-uridine, 2′-OH-ara-uridine, 5-(2-carbomethoxyvinyl) uridine, and 5-[3-(1-E-propenylamino)]uridine.

[0243] In some embodiments, the modified nucleobase is a modified cytosine. Exemplary nucleobases and nucleosides having a modified cytosine include 5-aza-cytidine, 6-aza-cytidine, pseudoisocytidine, 3-methyl-cytidine (m³C), N4-acetyl-cytidine (ac⁴C), 5-formyl-cytidine (f⁵C), N4-methyl-cytidine (m⁴C), 5-methyl-cytidine (m⁵C), 5-halo-cytidine (e.g., 5-iodo-cytidine), 5-hydroxymethyl-cytidine (hm⁵C), 1-methyl-pseudoisocytidine, pyrrolo-cytidine, pyrrolo-pseudoisocytidine, 2-thio-cytidine (s2C), 2-thio-5-methyl-cytidine, 4-thio-pseudoisocytidine, 4-thio-1-methyl-pseudoisocytidine, 4-thio-1-methyl-1-deaza-pseudoisocytidine, 1-methyl-1-deaza-pseudoisocytidine, zebularine, 5-aza-zebularine, 5-methyl-zebularine, 5-aza-2-thio-zebularine, 2-thio-zebularine, 2-methoxy-cytidine, 2-methoxy-5-methyl-cytidine, 4-methoxy-pseudoisocytidine, 4-methoxy-1-methyl-pseudoisocytidine, lysidine (k₂C), α-thio-cytidine, 2′-O-methyl-cytidine (Cm), 5,2′-O-dimethylcytidine (m⁵Cm), N4-acetyl-2′-O-methyl-cytidine (ac⁴Cm), N4,2′-O-dimethylcytidine (m⁴Cm), 5-formyl-2′-O-methyl-cytidine (f⁵Cm), N4,N4,2′-O-trimethyl-cytidine (m⁴₂Cm), 1-thio-cytidine, 2′-F-ara-cytidine, 2′-F-cytidine, and 2′-OH-ara-cytidine.

[0244] In some embodiments, the modified nucleobase is a modified adenine. Exemplary nucleobases and nucleosides having a modified adenine include α-thio-adenosine, 2-amino-purine, 2, 6-diaminopurine, 2-amino-6-halo-purine (e.g., 2-amino-6-chloro-purine), 6-halo-purine (e.g., 6-chloro-purine), 2-amino-6-methyl-purine, 8-azido-adenosine, 7-deaza-adenine, 7-deaza-8-aza-adenine, 7-deaza-2-amino-purine, 7-deaza-8-aza-2-amino-purine, 7-deaza-2,6-diaminopurine, 7-deaza-8-aza-2,6-diaminopurine, 1-methyl-adenosine (m¹A), 2-methyl-adenine (m²A), N6-methyl-adenosine (m⁶A), 2-methylthio-N6-methyl-adenosine (ms²m⁶A), N6-isopentenyl-adenosine (i⁶A), 2-methylthio-N6-isopentenyl-adenosine (ms²i⁶A), N6-(cis-hydroxyisopentenyl)adenosine (io⁶A), 2-methylthio-N6-(cis-hydroxyisopentenyl)adenosine (ms²io⁶A), N6-glycinylcarbamoyl-adenosine (g⁶A), N6-threonylcarbamoyl-adenosine (t⁶A), N6-methyl-N6-threonylcarbamoyl-adenosine (mt⁶A), 2-methylthio-N6-threonylcarbamoyl-adenosine (ms²g⁶A), N6,N6-dimethyl-adenosine (m⁶₂A), N6-hydroxynorvalylcarbamoyl-adenosine (hn⁶A), 2-methylthio-N6-hydroxynorvalylcarbamoyl-adenosine (ms²hn⁶A), N6-acetyl-adenosine (ac⁶A), 7-methyl-adenine, 2-methylthio-adenine, 2-methoxy-adenine, α-thio-adenosine, 2′-O-methyl-adenosine (Am), N6,2′-O-dimethyl-adenosine (m⁶Am), N6,N6,2′-O-trimethyl-adenosine (m⁶₂Am), 1,2′-O-dimethyl-adenosine (m¹Am), 2′-O-ribosyladenosine (phosphate) (Ar(p)), 2-amino-N6-methyl-purine, 1-thio-adenosine, 8-azido-adenosine, 2′-F-ara-adenosine, 2′-F-adenosine, 2′-OH-ara-adenosine, and N6-(19-amino-pentaoxanonadecyl)-adenosine.

[0245] In some embodiments, the modified nucleobase is a modified guanine. Exemplary nucleobases and nucleosides having a modified guanine include α-thio-guanosine, inosine (I), 1-methyl-inosine (m¹I), wyosine (imG), methylwyosine (mimG), 4-demethyl-wyosine (imG-14), isowyosine (imG2), wybutosine (yW), peroxywybutosine (o₂yW), hydroxywybutosine (OhyW), undermodified hydroxywybutosine (OhyW*), 7-deaza-guanosine, queuosine (Q), epoxyqueuosine (oQ), galactosyl-queuosine (galQ), mannosylqueuosine (manQ), 7-cyano-7-deaza-guanosine (preQ₀), 7-aminomethyl-7-deaza-guanosine (preQ₁), archaeosine (G+), 7-deaza-8-aza-guanosine, 6-thio-guanosine, 6-thio-7-deaza-guanosine, 6-thio-7-deaza-8-aza-guanosine, 7-methyl-guanosine (m⁷G), 6-thio-7-methyl-guanosine, 7-methyl-inosine, 6-methoxy-guanosine, 1-methyl-guanosine (m¹G), N2-methyl-guanosine (m²G), N2,N2-dimethyl-guanosine (m²₂G), N2,7-dimethyl-guanosine (m^{2,7}G), N2, N2,7-dimethyl-guanosine (m^{2,2,7}G), 8-oxo-guanosine, 7-methyl-8-oxo-guanosine, 1-methyl-6-thio-guanosine, N2-methyl-6-thio-guanosine, N2,N2-dimethyl-6-thio-guanosine, α-thio-guanosine, 2′-O-methyl-guanosine (Gm), N2-methyl-2′-O-methyl-guanosine (m²Gm), N2,N2-dimethyl-2′-O-methyl-guanosine (m²₂Gm), 1-methyl-2′-O-methyl-guanosine (m¹Gm), N2,7-dimethyl-2′-O-methyl-guanosine (m^{2,7}Gm), 2′-O-methyl-inosine (Im), 1,2′-O-dimethylinosine (m¹Im), 2′-O-ribosylguanosine (phosphate) (Gr(p)), 1-thio-guanosine, 06-methyl-guanosine, 2′-F-ara-guanosine, and 2′-F-guanosine.

[0246] In some embodiments, an mRNA of the invention includes a combination of one or more of the aforementioned modified nucleobases (e.g., a combination of 2, 3 or 4 of the aforementioned modified nucleobases.)

[0247] In some embodiments, the modified nucleobase is pseudouridine (ψ), N1-methylpseudouridine (m¹ψ), 2-thiouridine, 4′-thiouridine, 5-methylcytosine, 2-thio-1-methyl-1-deaza-pseudouridine, 2-thio-1-methyl-pseudouridine, 2-thio-5-aza-uridine, 2-thio-dihydropseudouridine, 2-thio-dihydrouridine, 2-thio-pseudouridine, 4-methoxy-2-thio-pseudouridine, 4-methoxy-pseudouridine, 4-thio-1-methyl-pseudouridine, 4-thio-pseudouridine, 5-aza-uridine, dihydropseudouridine, 5-methoxyuridine, or 2′-O-methyl uridine. In some embodiments, an mRNA of the invention includes a combination of one or more of the aforementioned modified nucleobases (e.g., a combination of 2, 3 or 4 of the aforementioned modified nucleobases.) In some embodiments, the modified nucleobase is a modified cytosine.

[0248] Exemplary nucleobases and nucleosides having a modified cytosine include N4-acetyl-cytidine (ac⁴C), 5-methyl-cytidine (m⁵C), 5-halo-cytidine (e.g., 5-iodo-cytidine), 5-hydroxymethyl-cytidine (hm⁵C), 1-methyl-pseudoisocytidine, 2-thio-cytidine (s²C), 2-thio-5-methyl-cytidine. In some embodiments, an mRNA of the invention includes a combination of one or more of the aforementioned modified nucleobases (e.g., a combination of 2, 3 or 4 of the aforementioned modified nucleobases.) In some embodiments, the modified nucleobase is a modified adenine.

[0249] Exemplary nucleobases and nucleosides having a modified adenine include 7-deaza-adenine, 1-methyl-adenosine (m¹A), 2-methyl-adenine (m²A), N6-methyl-adenosine (m⁶A). In some embodiments, an mRNA of the invention includes a combination of one or more of the aforementioned modified nucleobases (e.g., a combination of 2, 3 or 4 of the aforementioned modified nucleobases.) In some embodiments, the modified nucleobase is a modified guanine.

[0250] Exemplary nucleobases and nucleosides having a modified guanine include inosine (I), 1-methyl-inosine (m¹I), wyosine (imG), methylwyosine (mimG), 7-deaza-guanosine, 7-cyano-7-deaza-guanosine (preQ₀), 7-aminomethyl-7-deaza-guanosine (preQ₁), 7-methyl-guanosine (m⁷G), 1-methyl-guanosine (m¹G), 8-oxo-guanosine, 7-methyl-8-oxo-guanosine. In some embodiments, an mRNA of the invention includes a combination of one or more of the aforementioned modified nucleobases (e.g., a combination of 2, 3 or 4 of the aforementioned modified nucleobases.)

[0251] In some embodiments, the modified nucleobase is 1-methyl-pseudouridine (m¹ψ), 5-methoxy-uridine (mo⁵U), 5-methyl-cytidine (m⁵C), pseudouridine (ψ), α-thio-guanosine, or α-thio-adenosine. In some embodiments, an mRNA of the invention includes a combination of one or more of the aforementioned modified nucleobases (e.g., a combination of 2, 3 or 4 of the aforementioned modified nucleobases.)

[0252] In some embodiments, the mRNA comprises pseudouridine (ψ). In some embodiments, the mRNA comprises pseudouridine (ψ) and 5-methyl-cytidine (m⁵C). In some embodiments, the mRNA comprises 1-methyl-pseudouridine (m¹ψ). In some embodiments, the mRNA comprises 1-methyl-pseudouridine (m¹ψ) and 5-methyl-cytidine (m⁵C). In some embodiments, the mRNA comprises 2-thiouridine (s²U). In some embodiments, the mRNA comprises 2-thiouridine and 5-methyl-cytidine (m⁵C). In some embodiments, the mRNA comprises 5-methoxy-uridine (mo⁵U). In some embodiments, the mRNA comprises 5-methoxy-uridine (mo⁵U) and 5-methyl-cytidine (m⁵C). In some embodiments, the mRNA comprises 2′-O-methyl uridine. In some embodiments, the mRNA comprises 2′-O-methyl uridine and 5-methyl-cytidine (m⁵C). In some embodiments, the mRNA comprises comprises N6-methyl-adenosine (m⁶A). In some embodiments, the mRNA comprises N6-methyl-adenosine (m⁶A) and 5-methyl-cytidine (m⁵C).

[0253] In certain embodiments, an mRNA of the invention is uniformly modified (i.e., fully modified, modified through-out the entire sequence) for a particular modification. For example, an mRNA can be uniformly modified with 5-methyl-cytidine (m⁵C), meaning that all cytosine residues in the mRNA sequence are replaced with 5-methyl-cytidine (m⁵C). Similarly, mRNAs of the invention can be uniformly modified for any type of nucleoside residue present in the sequence by replacement with a modified residue such as those set forth above.

[0254] In some embodiments, an mRNA of the invention may be modified in a coding region (e.g., an open reading frame encoding a polypeptide). In other embodiments, an mRNA may be modified in regions besides a coding region. For example, in some embodiments, a 5′-UTR and/or a 3′-UTR are provided, wherein either or both may independently contain one or more different nucleoside modifications. In such embodiments, nucleoside modifications may also be present in the coding region.

[0255] Examples of nucleoside modifications and combinations thereof that may be present in mmRNAs of the present invention include, but are not limited to, those described in PCT Patent Application Publications: WO2012045075, WO2014081507, WO2014093924, WO2014164253, and WO2014159813.

[0256] The mmRNAs of the invention can include a combination of modifications to the sugar, the nucleobase, and/or the internucleoside linkage. These combinations can include any one or more modifications described herein.

[0257] Examples of modified nucleosides and modified nucleoside combinations are provided below in Table 9 and Table 10. These combinations of modified nucleotides can be used to form the mmRNAs of the invention. In certain embodiments, the modified nucleosides may be partially or completely substituted for the natural nucleotides of the mRNAs of the invention. As a non-limiting example, the natural nucleotide uridine may be substituted with a modified nucleoside described herein. In another non-limiting example, the natural nucleoside uridine may be partially substituted (e.g., about 0.1%, 1%, 5%, 10%, 15%, 20%, 25%, 30%, 35%, 40%, 45%, 50%, 55%, 60%, 65%, 70%, 75%, 80%, 85%, 90%, 95% or 99.9% of the natural uridines) with at least one of the modified nucleoside disclosed herein.

TABLE 9
Combinations of Nucleoside Modifications

| Modified Nucleotide | Modified Nucleotide Combination |
|---|---|
| α-thio-cytidine | α-thio-cytidine/5-iodo-uridine |
| | α-thio-cytidine/N1-methyl-pseudouridine |
| | α-thio-cytidine/α-thio-uridine |
| | α-thio-cytidine/5-methyl-uridine |
| | α-thio-cytidine/pseudo-uridine |
| | about 50% of the cytosines are α-thio-cytidine |
| pseudoisocytidine | pseudoisocytidine/5-iodo-uridine |
| | pseudoisocytidine/N1-methyl-pseudouridine |
| | pseudoisocytidine/α-thio-uridine |
| | pseudoisocytidine/5-methyl-uridine |
| | pseudoisocytidine/pseudouridine |
| | about 25% of cytosines are pseudoisocytidine |
| | pseudoisocytidine/about 50% of uridines are N1- |
| | methyl-pseudouridine and about 50% of uridines |
| | are pseudouridine |
| | pseudoisocytidine/about 25% of uridines are N1- |
| | methyl-pseudouridine and about 25% of uridines |
| | are pseudouridine |
| pyrrolo-cytidine | pyrrolo-cytidine/5-iodo-uridine |
| | pyrrolo-cytidine/N1-methyl-pseudouridine |
| | pyrrolo-cytidine/α-thio-uridine |
| | pyrrolo-cytidine/5-methyl-uridine |
| | pyrrolo-cytidine/pseudouridine |
| | about 50% of the cytosines are pyrrolo-cytidine |
| 5-methyl-cytidine | 5-methyl-cytidine/5-iodo-uridine |
| | 5-methyl-cytidine/N1-methyl-pseudouridine |
| | 5-methyl-cytidine/α-thio-uridine |
| | 5-methyl-cytidine/5-methyl-uridine |
| | 5-methyl-cytidine/pseudouridine |
| | about 25% of cytosines are 5-methyl-cytidine |
| | about 50% of cytosines are 5-methyl-cytidine |
| | 5-methyl-cytidine/5-methoxy-uridine |
| | 5-methyl-cytidine/5-bromo-uridine |
| | 5-methyl-cytidine/2-thio-uridine |
| | 5-methyl-cytidine/about 50% of uridines are 2- |
| | thio-uridine |
| | about 50% of uridines are 5-methyl-cytidine/about |
| | 50% of uridines are 2-thio-uridine |
| N4-acetyl-cytidine | N4-acetyl-cytidine/5-iodo-uridine |
| | N4-acetyl-cytidine/N1-methyl-pseudouridine |
| | N4-acetyl-cytidine/α-thio-uridine |
| | N4-acetyl-cytidine/5-methyl-uridine |
| | N4-acetyl-cytidine/pseudouridine |
| | about 50% of cytosines are N4-acetyl-cytidine |
| | about 25% of cytosines are N4-acetyl-cytidine |
| | N4-acetyl-cytidine/5-methoxy-uridine |
| | N4-acetyl-cytidine/5-bromo-uridine |
| | N4-acetyl-cytidine/2-thio-uridine |
| | about 50% of cytosines are N4-acetyl-cytidine/ |
| | about 50% of uridines are 2-thio-uridine |

TABLE 10
Modified Nucleosides and Combinations Thereof

1-(2,2,2-Trifluoroethyl)pseudo-UTP
1-Ethyl-pseudo-UTP
1-Methyl-pseudo-U-alpha-thio-TP
1-methyl-pseudouridine TP, ATP, GTP, CTP
1-methyl-pseudo-UTP/5-methyl-CTP/ATP/GTP
1-methyl-pseudo-UTP/CTP/ATP/GTP
1-Propyl-pseudo-UTP
25% 5-Aminoallyl-CTP + 75% CTP/25% 5-Methoxy-UTP + 75% UTP
25% 5-Aminoallyl-CTP + 75% CTP/75% 5-Methoxy-UTP + 25% UTP
25% 5-Bromo-CTP + 75% CTP/25% 5-Methoxy-UTP + 75% UTP
25% 5-Bromo-CTP + 75% CTP/75% 5-Methoxy-UTP + 25% UTP
25% 5-Bromo-CTP + 75% CTP/1-Methyl-pseudo-UTP
25% 5-Carboxy-CTP + 75% CTP/25% 5-Methoxy-UTP + 75% UTP
25% 5-Carboxy-CTP + 75% CTP/75% 5-Methoxy-UTP + 25% UTP
25% 5-Ethyl-CTP + 75% CTP/25% 5-Methoxy-UTP + 75% UTP
25% 5-Ethyl-CTP + 75% CTP/75% 5-Methoxy-UTP + 25% UTP
25% 5-Ethynyl-CTP + 75% CTP/25% 5-Methoxy-UTP + 75% UTP
25% 5-Ethynyl-CTP + 75% CTP/75% 5-Methoxy-UTP + 25% UTP
25% 5-Fluoro-CTP + 75% CTP/25% 5-Methoxy-UTP + 75% UTP
25% 5-Fluoro-CTP + 75% CTP/75% 5-Methoxy-UTP + 25% UTP
25% 5-Formyl-CTP + 75% CTP/25% 5-Methoxy-UTP + 75% UTP
25% 5-Formyl-CTP + 75% CTP/75% 5-Methoxy-UTP + 25% UTP
25% 5-Hydroxymethyl-CTP + 75% CTP/25% 5-Methoxy-UTP +
75% UTP
25% 5-Hydroxymethyl-CTP + 75% CTP/75% 5-Methoxy-UTP +
25% UTP
25% 5-Iodo-CTP + 75% CTP/25% 5-Methoxy-UTP + 75% UTP
25% 5-Iodo-CTP + 75% CTP/75% 5-Methoxy-UTP + 25% UTP
25% 5-Methoxy-CTP + 75% CTP/25% 5-Methoxy-UTP + 75% UTP
25% 5-Methoxy-CTP + 75% CTP/75% 5-Methoxy-UTP + 25% UTP
25% 5-Methyl-CTP + 75% CTP/25% 5-Methoxy-UTP + 75%
1-Methyl-pseudo-UTP
25% 5-Methyl-CTP + 75% CTP/25% 5-Methoxy-UTP + 75% UTP
25% 5-Methyl-CTP + 75% CTP/50% 5-Methoxy-UTP + 50%
1-Methyl-pseudo-UTP
25% 5-Methyl-CTP + 75% CTP/50% 5-Methoxy-UTP + 50% UTP
25% 5-Methyl-CTP + 75% CTP/5-Methoxy-UTP
25% 5-Methyl-CTP + 75% CTP/75% 5-Methoxy-UTP + 25%
1-Methyl-pseudo-UTP
25% 5-Methyl-CTP + 75% CTP/75% 5-Methoxy-UTP + 25% UTP
25% 5-Phenyl-CTP + 75% CTP/25% 5-Methoxy-UTP + 75% UTP
25% 5-Phenyl-CTP + 75% CTP/75% 5-Methoxy-UTP + 25% UTP
25% 5-Trifluoromethyl-CTP + 75% CTP/25% 5-Methoxy-UTP +
75% UTP
25% 5-Trifluoromethyl-CTP + 75% CTP/75% 5-Methoxy-UTP +
25% UTP
25% 5-Trifluoromethyl-CTP + 75% CTP/1-Methyl-pseudo-UTP
25% N4-Ac-CTP + 75% CTP/25% 5-Methoxy-UTP + 75% UTP
25% N4-Ac-CTP + 75% CTP/75% 5-Methoxy-UTP + 25% UTP
25% N4-Bz-CTP + 75% CTP/25% 5-Methoxy-UTP + 75% UTP
25% N4-Bz-CTP + 75% CTP/75% 5-Methoxy-UTP + 25% UTP
25% N4-Methyl-CTP + 75% CTP/25% 5-Methoxy-UTP + 75% UTP
25% N4-Methyl-CTP + 75% CTP/75% 5-Methoxy-UTP + 25% UTP
25% Pseudo-iso-CTP + 75% CTP/25% 5-Methoxy-UTP + 75% UTP
25% Pseudo-iso-CTP + 75% CTP/75% 5-Methoxy-UTP + 25% UTP
25% 5-Bromo-CTP/75% CTP/Pseudo-UTP
25% 5-methoxy-UTP/25% 5-methyl-CTP/ATP/GTP
25% 5-methoxy-UTP/5-methyl-CTP/ATP/GTP
25% 5-methoxy-UTP/75% 5-methyl-CTP/ATP/GTP
25% 5-methoxy-UTP/CTP/ATP/GTP
25% 5-metoxy-UTP/50% 5-methyl-CTP/ATP/GTP
2-Amino-ATP
2-Thio-CTP
2-thio-pseudouridine TP, ATP, GTP, CTP
2-Thio-pseudo-UTP
2-Thio-UTP
3-Methyl-CTP
3-Methyl-pseudo-UTP
4-Thio-UTP
50% 5-Bromo-CTP + 50% CTP/1-Methyl-pseudo-UTP
50% 5-Hydroxymethyl-CTP + 50% CTP/1-Methyl-pseudo-UTP
50% 5-methoxy-UTP/5-methyl-CTP/ATP/GTP
50% 5-Methyl-CTP + 50% CTP/25% 5-Methoxy-UTP + 75%
1-Methyl-pseudo-UTP
50% 5-Methyl-CTP + 50% CTP/25% 5-Methoxy-UTP + 75% UTP
50% 5-Methyl-CTP + 50% CTP/50% 5-Methoxy-UTP + 50%
1-Methyl-pseudo-UTP
50% 5-Methyl-CTP + 50% CTP/50% 5-Methoxy-UTP + 50% UTP
50% 5-Methyl-CTP + 50% CTP/5-Methoxy-UTP
50% 5-Methyl-CTP + 50% CTP/75% 5-Methoxy-UTP + 25%
1-Methyl-pseudo-UTP
50% 5-Methyl-CTP + 50% CTP/75% 5-Methoxy-UTP + 25% UTP
50% 5-Trifluoromethyl-CTP + 50% CTP/1-Methyl-pseudo-UTP
50% 5-Bromo-CTP/50% CTP/Pseudo-UTP
50% 5-methoxy-UTP/25% 5-methyl-CTP/ATP/GTP
50% 5-methoxy-UTP/50% 5-methyl-CTP/ATP/GTP
50% 5-methoxy-UTP/75% 5-methyl-CTP/ATP/GTP
50% 5-methoxy-UTP/CTP/ATP/GTP
5-Aminoallyl-CTP
5-Aminoallyl-CTP/5-Methoxy-UTP
5-Aminoallyl-UTP
5-Bromo-CTP
5-Bromo-CTP/5-Methoxy-UTP
5-Bromo-CTP/1-Methyl-pseudo-UTP
5-Bromo-CTP/Pseudo-UTP
5-bromocytidine TP, ATP, GTP, UTP
5-Bromo-UTP
5-Carboxy-CTP/5-Methoxy-UTP
5-Ethyl-CTP/5-Methoxy-UTP
5-Ethynyl-CTP/5-Methoxy-UTP
5-Fluoro-CTP/5-Methoxy-UTP
5-Formyl-CTP/5-Methoxy-UTP
5-Hydroxy-methyl-CTP/5-Methoxy-UTP
5-Hydroxymethyl-CTP
5-Hydroxymethyl-CTP/1-Methyl-pseudo-UTP
5-Hydroxymethyl-CTP/5-Methoxy-UTP
5-hydroxymethyl-cytidine TP, ATP, GTP, UTP
5-Iodo-CTP/5-Methoxy-UTP
5-Me-CTP/5-Methoxy-UTP
5-Methoxy carbonyl methyl-UTP
5-Methoxy-CTP/5-Methoxy-UTP
5-methoxy-uridine TP, ATP, GTP, UTP
5-methoxy-UTP
5-Methoxy-UTP
5-Methoxy-UTP/N6-Isopentenyl-ATP
5-methoxy-UTP/25% 5-methyl-CTP/ATP/GTP
5-methoxy-UTP/5-methyl-CTP/ATP/GTP
5-methoxy-UTP/75% 5-methyl-CTP/ATP/GTP
5-methoxy-UTP/CTP/ATP/GTP
5-Methyl-2-thio-UTP
5-Methylaminomethyl-UTP
5-Methyl-CTP/5-Methoxy-UTP
5-Methyl-CTP/5-Methoxy-UTP(cap 0)
5-Methyl-CTP/5-Methoxy-UTP(No cap)
5-Methyl-CTP/25% 5-Methoxy-UTP + 75% 1-Methyl-pseudo-UTP
5-Methyl-CTP/25% 5-Methoxy-UTP + 75% UTP
5-Methyl-CTP/50% 5-Methoxy-UTP + 50% 1-Methyl-pseudo-UTP
5-Methyl-CTP/50% 5-Methoxy-UTP + 50% UTP
5-Methyl-CTP/5-Methoxy-UTP/N6-Me-ATP
5-Methyl-CTP/75% 5-Methoxy-UTP + 25% 1-Methyl-pseudo-UTP
5-Methyl-CTP/75% 5-Methoxy-UTP + 25% UTP
5-Phenyl-CTP/5-Methoxy-UTP
5-Trifluoro-methyl-CTP/5-Methoxy-UTP
5-Trifluoromethyl-CTP
5-Trifluoromethyl-CTP/5-Methoxy-UTP
5-Trifluoromethyl-CTP/1-Methyl-pseudo-UTP
5-Trifluoromethyl-CTP/Pseudo-UTP
5-Trifluoromethyl-UTP
5-trifluromethylcytidine TP, ATP, GTP, UTP
75% 5-Aminoallyl-CTP + 25% CTP/25% 5-Methoxy-UTP + 75% UTP
75% 5-Aminoallyl-CTP + 25% CTP/75% 5-Methoxy-UTP + 25% UTP
75% 5-Bromo-CTP + 25% CTP/25% 5-Methoxy-UTP + 75% UTP
75% 5-Bromo-CTP + 25% CTP/75% 5-Methoxy-UTP + 25% UTP
75% 5-Carboxy-CTP + 25% CTP/25% 5-Methoxy-UTP + 75% UTP
75% 5-Carboxy-CTP + 25% CTP/75% 5-Methoxy-UTP + 25% UTP
75% 5-Ethyl-CTP + 25% CTP/25% 5-Methoxy-UTP + 75% UTP
75% 5-Ethyl-CTP + 25% CTP/75% 5-Methoxy-UTP + 25% UTP
75% 5-Ethynyl-CTP + 25% CTP/25% 5-Methoxy-UTP + 75% UTP
75% 5-Ethynyl-CTP + 25% CTP/75% 5-Methoxy-UTP + 25% UTP
75% 5-Fluoro-CTP + 25% CTP/25% 5-Methoxy-UTP + 75% UTP
75% 5-Fluoro-CTP + 25% CTP/75% 5-Methoxy-UTP + 25% UTP
75% 5-Formyl-CTP + 25% CTP/25% 5-Methoxy-UTP + 75% UTP
75% 5-Formyl-CTP + 25% CTP/75% 5-Methoxy-UTP + 25% UTP
75% 5-Hydroxymethyl-CTP + 25% CTP/25% 5-Methoxy-UTP +
75% UTP
75% 5-Hydroxymethyl-CTP + 25% CTP/75% 5-Methoxy-UTP +
25% UTP
75% 5-Iodo-CTP + 25% CTP/25% 5-Methoxy-UTP + 75% UTP
75% 5-Iodo-CTP + 25% CTP/75% 5-Methoxy-UTP + 25% UTP
75% 5-Methoxy-CTP + 25% CTP/25% 5-Methoxy-UTP + 75% UTP
75% 5-Methoxy-CTP + 25% CTP/75% 5-Methoxy-UTP + 25% UTP
75% 5-methoxy-UTP/5-methyl-CTP/ATP/GTP
75% 5-Methyl-CTP + 25% CTP/25% 5-Methoxy-UTP + 75%
1-Methyl-pseudo-UTP
75% 5-Methyl-CTP + 25% CTP/25% 5-Methoxy-UTP + 75% UTP
75% 5-Methyl-CTP + 25% CTP/50% 5-Methoxy-UTP + 50%
1-Methyl-pseudo-UTP
75% 5-Methyl-CTP + 25% CTP/50% 5-Methoxy-UTP + 50% UTP
75% 5-Methyl-CTP + 25% CTP/5-Methoxy-UTP
75% 5-Methyl-CTP + 25% CTP/75% 5-Methoxy-UTP + 25%
1-Methyl-pseudo-UTP
75% 5-Methyl-CTP + 25% CTP/75% 5-Methoxy-UTP + 25% UTP
75% 5-Phenyl-CTP + 25% CTP/25% 5-Methoxy-UTP + 75% UTP
75% 5-Phenyl-CTP + 25% CTP/75% 5-Methoxy-UTP + 25% UTP
75% 5-Trifluoromethyl-CTP + 25% CTP/25% 5-Methoxy-UTP +
75% UTP
75% 5-Trifluoromethyl-CTP + 25% CTP/75% 5-Methoxy-UTP +
25% UTP
75% 5-Trifluoromethyl-CTP + 25% CTP/1-Methyl-pseudo-UTP
75% N4-Ac-CTP + 25% CTP/25% 5-Methoxy-UTP + 75% UTP
75% N4-Ac-CTP + 25% CTP/75% 5-Methoxy-UTP + 25% UTP
75% N4-Bz-CTP + 25% CTP/25% 5-Methoxy-UTP + 75% UTP
75% N4-Bz-CTP + 25% CTP/75% 5-Methoxy-UTP + 25% UTP
75% N4-Methyl-CTP + 25% CTP/25% 5-Methoxy-UTP + 75% UTP
75% N4-Methyl-CTP + 25% CTP/75% 5-Methoxy-UTP + 25% UTP
75% Pseudo-iso-CTP + 25% CTP/25% 5-Methoxy-UTP + 75% UTP
75% Pseudo-iso-CTP + 25% CTP/75% 5-Methoxy-UTP + 25% UTP
75% 5-Bromo-CTP/25% CTP/1-Methyl-pseudo-UTP
75% 5-Bromo-CTP/25% CTP/Pseudo-UTP
75% 5-methoxy-UTP/25% 5-methyl-CTP/ATP/GTP
75% 5-methoxy-UTP/50% 5-methyl-CTP/ATP/GTP
75% 5-methoxy-UTP/75% 5-methyl-CTP/ATP/GTP
75% 5-methoxy-UTP/CTP/ATP/GTP
8-Aza-ATP
Alpha-thio-CTP
CTP/25% 5-Methoxy-UTP + 75% 1-Methyl-pseudo-UTP
CTP/25% 5-Methoxy-UTP + 75% UTP
CTP/50% 5-Methoxy-UTP + 50% 1-Methyl-pseudo-UTP
CTP/50% 5-Methoxy-UTP + 50% UTP
CTP/5-Methoxy-UTP
CTP/5-Methoxy-UTP (cap 0)
CTP/5-Methoxy-UTP(No cap)
CTP/75% 5-Methoxy-UTP + 25% 1-Methyl-pseudo-UTP
CTP/75% 5-Methoxy-UTP + 25% UTP
CTP/UTP(No cap)
N1-Me-GTP
N4-Ac-CTP
N4Ac-CTP/1-Methyl-pseudo-UTP
N4Ac-CTP/5-Methoxy-UTP
N4-acetyl-cytidine TP, ATP, GTP, UTP
N4-Bz-CTP/5-Methoxy-UTP
N4-methyl CTP
N4-Methyl-CTP/5-Methoxy-UTP
Pseudo-iso-CTP/5-Methoxy-UTP
PseudoU-alpha-thio-TP
pseudouridine TP, ATP, GTP, CTP
pseudo-UTP/5-methyl-CTP/ATP/GTP
UTP-5-oxyacetic acid Me ester
Xanthosine

[0258] According to the invention, polynucleotides of the invention may be synthesized to comprise the combinations or single modifications of Table 9 or Table 10.

[0259] Where a single modification is listed, the listed nucleoside or nucleotide represents 100 percent of that A, U, G or C nucleotide or nucleoside having been modified. Where percentages are listed, these represent the percentage of that particular A, U, G or C nucleobase triphosphate of the total amount of A, U, G, or C triphosphate present. For example, the combination: 25% 5-Aminoallyl-CTP+75% CTP/25% 5-Methoxy-UTP+75% UTP refers to a polynucleotide where 25% of the cytosine triphosphates are 5-Aminoallyl-CTP while 75% of the cytosines are CTP; whereas 25% of the uracils are 5-methoxy UTP while 75% of the uracils are UTP. Where no modified UTP is listed then the naturally occurring ATP, UTP, GTP and/or CTP is used at 100% of the sites of those nucleotides found in the polynucleotide. In this example all of the GTP and ATP nucleotides are left unmodified.

[0260] The mRNAs of the present invention, or regions thereof, may be codon optimized. Codon optimization methods are known in the art and may be useful for a variety of purposes: matching codon frequencies in host organisms to ensure proper folding, bias GC content to increase mRNA stability or reduce secondary structures, minimize tandem repeat codons or base runs that may impair gene construction or expression, customize transcriptional and translational control regions, insert or remove proteins trafficking sequences, remove/add post translation modification sites in encoded proteins (e.g., glycosylation sites), add, remove or shuffle protein domains, insert or delete restriction sites, modify ribosome binding sites and mRNA degradation sites, adjust translation rates to allow the various domains of the protein to fold properly, or to reduce or eliminate problem secondary structures within the polynucleotide. Codon optimization tools, algorithms and services are known in the art; non-limiting examples include services from GeneArt (Life Technologies), DNA2.0 (Menlo Park, Calif.) and/or proprietary methods. In one embodiments, the mRNA sequence is optimized using optimization algorithms, e.g., to optimize expression in mammalian cells or enhance mRNA stability.

[0261] In certain embodiments, the present invention includes polynucleotides having at least 80%, at least 85%, at least 90%, at least 95%, at least 98%, or at least 99% sequence identity to any of the polynucleotide sequences described herein. mRNAs of the present invention may be produced by means available in the art, including but not limited to in vitro transcription (IVT) and synthetic methods.

[0262] Enzymatic (IVT), solid-phase, liquid-phase, combined synthetic methods, small region synthesis, and ligation methods may be utilized. In one embodiment, mRNAs are made using IVT enzymatic synthesis methods. Methods of making polynucleotides by IVT are known in the art and are described in International Application PCT/US2013/30062, the contents of which are incorporated herein by reference in their entirety. Accordingly, the present invention also includes polynucleotides, e.g., DNA, constructs and vectors that may be used to in vitro transcribe an mRNA described herein.

[0263] Non-natural modified nucleobases may be introduced into polynucleotides, e.g., mRNA, during synthesis or post-synthesis. In certain embodiments, modifications may be on internucleoside linkages, purine or pyrimidine bases, or sugar. In particular embodiments, the modification may be introduced at the terminal of a polynucleotide chain or anywhere else in the polynucleotide chain; with chemical synthesis or with a polymerase enzyme. Examples of modified nucleic acids and their synthesis are disclosed in PCT application No. PCT/US2012/058519. Synthesis of modified polynucleotides is also described in Verma and Eckstein, Annual Review of Biochemistry, vol. 76, 99-134 (1998).

[0264] Either enzymatic or chemical ligation methods may be used to conjugate polynucleotides or their regions with different functional moieties, such as targeting or delivery agents, fluorescent labels, liquids, nanoparticles, etc. Conjugates of polynucleotides and modified polynucleotides are reviewed in Goodchild, Bioconjugate Chemistry, vol. 1(3), 165-187 (1990).

### Sequence Optimization of Nucleotide Sequence Encoding a BH3 Domain Polypeptide

[0265] In some embodiments, the polynucleotide (e.g., a RNA, e.g., a mRNA) of the invention is sequence optimized. In some embodiments, the polynucleotide (e.g., a RNA, e.g., a mRNA) of the invention comprises a nucleotide sequence (e.g., an ORF) encoding one or more BH3 domains, a 5′-UTR, a 3′-UTR, a miRNA, a nucleotide sequence encoding a linker, or any combination thereof, that is sequence optimized.

[0266] A sequence optimized nucleotide sequence, e.g., a codon optimized mRNA sequence encoding a BH3 polypeptide (e.g., a BH3 multimeric polypeptide, e.g., PUMA BH3 multimer), is a sequence comprising at least one synonymous nucleobase substitution with respect to a reference sequence (e.g., a wild type nucleotide sequence encoding a BH3 polypeptide).

[0267] A sequence optimized nucleotide sequence can be partially or completely different in sequence from the reference sequence. For example, a reference sequence encoding polyserine uniformly encoded by TCT codons can be sequence optimized by having 100% of its nucleobases substituted (for each codon, T in position 1 replaced by A, C in position 2 replaced by G, and T in position 3 replaced by C) to yield a sequence encoding polyserine which would be uniformly encoded by AGC codons. The percentage of sequence identity obtained from a global pairwise alignment between the reference polyserine nucleic acid sequence and the sequence optimized polyserine nucleic acid sequence would be 0%. However, the protein products from both sequences would be 100% identical.

[0268] Some sequence optimization (also sometimes referred to codon optimization) methods are known in the art (and discussed in more detail below) and can be useful to achieve one or more desired results. These results can include, e.g., matching codon frequencies in certain tissue targets and/or host organisms to ensure proper folding; biasing G/C content to increase mRNA stability or reduce secondary structures; minimizing tandem repeat codons or base runs that can impair gene construction or expression; customizing transcriptional and translational control regions; inserting or removing protein trafficking sequences; removing/adding post translation modification sites in an encoded protein (e.g., glycosylation sites); adding, removing or shuffling protein domains; inserting or deleting restriction sites; modifying ribosome binding sites and mRNA degradation sites; adjusting translational rates to allow the various domains of the protein to fold properly; and/or reducing or eliminating problem secondary structures within the polynucleotide. Sequence optimization tools, algorithms and services are known in the art, non-limiting examples include services from GeneArt (Life Technologies), DNA2.0 (Menlo Park Calif.) and/or proprietary methods.

[0269] Codon options for each amino acid are given in Table 11.

TABLE 11
Codon Options

| | Single Letter | |
|---|---|---|
| Amino Acid | Code | Codon Options |
| Isoleucine | I | ATT, ATC, ATA |
| Leucine | L | CTT, CTC, CTA, CTG, TTA, TTG |
| Valine | V | GTT, GTC, GTA, GTG |
| Phenylalanine | F | TTT, TTC |
| Methionine | M | ATG |
| Cysteine | C | TGT, TGC |
| Alanine | A | GCT, GCC, GCA, GCG |
| Glycine | G | GGT, GGC, GGA, GGG |
| Proline | P | CCT, CCC, CCA, CCG |
| Threonine | T | ACT, ACC, ACA, ACG |
| Serine | S | TCT, TCC, TCA, TCG, AGT, AGC |
| Tyrosine | Y | TAT, TAC |
| Tryptophan | W | TGG |
| Glutamine | Q | CAA, CAG |
| Asparagine | N | AAT, AAC |
| Histidine | H | CAT, CAC |
| Glutamic acid | E | GAA, GAG |
| Aspartic acid | D | GAT, GAC |
| Lysine | K | AAA, AAG |
| Arginine | R | CGT, CGC, CGA, CGG, AGA, AGG |
| Selenocysteine | Sec | UGA in mRNA in presence of |
| | | Selenocysteine insertion element |
| | | (SECIS) |
| Stop codons | Stop | TAA, TAG, TGA |

[0270] In some embodiments, a polynucleotide (e.g., a RNA, e.g., a mRNA) of the invention comprises a sequence-optimized nucleotide sequence (e.g., an ORF) encoding a polypeptide (e.g., BH3 polypeptide), a functional fragment, or a variant thereof, wherein the polypeptide (e.g., BH3 polypeptide), functional fragment, or a variant thereof encoded by the sequence-optimized nucleotide sequence has improved properties (e.g., compared to a BH3 polypeptide, functional fragment, or a variant thereof encoded by a reference nucleotide sequence that is not sequence optimized), e.g., improved properties related to expression efficacy after administration in vivo. Such properties include, but are not limited to, improving nucleic acid stability (e.g., mRNA stability), increasing translation efficacy in the target tissue, reducing the number of truncated proteins expressed, improving the folding or prevent misfolding of the expressed proteins, reducing toxicity of the expressed products, reducing cell death caused by the expressed products, increasing and/or decreasing protein aggregation.

[0271] In some embodiments, the sequence optimized nucleotide sequence is codon optimized for expression in human subjects, having structural and/or chemical features that avoid one or more of the problems in the art, for example, features which are useful for optimizing formulation and delivery of nucleic acid-based therapeutics while retaining structural and functional integrity; overcoming a threshold of expression; improving expression rates; half-life and/or protein concentrations; optimizing protein localization; and avoiding deleterious bio-responses such as the immune response and/or degradation pathways.

[0272] In some embodiments, the polynucleotides of the invention comprise a nucleotide sequence (e.g., a nucleotide sequence (e.g, an ORF) encoding a BH3 polypeptide, a nucleotide sequence (e.g, an ORF) encoding another polypeptide of interest, a 5′-UTR, a 3′-UTR, a microRNA, a nucleic acid sequence encoding a linker, or any combination thereof) that is sequence-optimized according to a method comprising:
[0273] (i) substituting at least one codon in a reference nucleotide sequence (e.g., an ORF encoding a BH3 polypeptide) with an alternative codon to increase or decrease uridine content to generate a uridine-modified sequence;
[0274] (ii) substituting at least one codon in a reference nucleotide sequence (e.g., an ORF encoding a BH3 polypeptide) with an alternative codon having a higher codon frequency in the synonymous codon set;
[0275] (iii) substituting at least one codon in a reference nucleotide sequence (e.g., an ORF encoding a BH3 polypeptide) with an alternative codon to increase G/C content; or
[0276] (iv) a combination thereof.

[0277] In some embodiments, the sequence optimized nucleotide sequence (e.g., an ORF encoding a BH3 polypeptide) has at least one improved property with respect to the reference nucleotide sequence.

[0278] In some embodiments, the sequence optimization method is multiparametric and comprises one, two, three, four, or more methods disclosed herein and/or other optimization methods known in the art.

[0279] Features, which can be considered beneficial in some embodiments of the invention, can be encoded by or within regions of the polynucleotide and such regions can be upstream (5′) to, downstream (3′) to, or within the region that encodes the BH3 polypeptide. These regions can be incorporated into the polynucleotide before and/or after sequence-optimization of the protein encoding region or open reading frame (ORF). Examples of such features include, but are not limited to, untranslated regions (UTRs), microRNA sequences, Kozak sequences, oligo(dT) sequences, poly-A tail, and detectable tags and can include multiple cloning sites that can have XbaI recognition.

[0280] In some embodiments, the polynucleotide of the invention comprises a 5′ UTR, a 3′ UTR and/or a miRNA. In some embodiments, the polynucleotide comprises two or more 5′ UTRs and/or 3′ UTRs, which can be the same or different sequences. In some embodiments, the polynucleotide comprises two or more miRNA, which can be the same or different sequences. Any portion of the 5′ UTR, 3′ UTR, and/or miRNA, including none, can be sequence-optimized and can independently contain one or more different structural or chemical modifications, before and/or after sequence optimization.

[0281] In some embodiments, after optimization, the polynucleotide is reconstituted and transformed into a vector such as, but not limited to, plasmids, viruses, cosmids, and artificial chromosomes. For example, the optimized polynucleotide can be reconstituted and transformed into chemically competent E. coli, yeast, neurospora, maize, drosophila, etc. where high copy plasmid-like or chromosome structures occur by methods described herein.

### Sequence-Optimized Nucleotide Sequences Encoding One or More BH3 Domains

[0282] In some embodiments, the polynucleotide of the invention comprises a sequence optimized nucleotide sequence encoding a polypeptide disclosed herein (e.g., BH3 polypeptide). In some embodiments, the polynucleotide of the invention comprises an open reading frame (ORF) encoding a multimeric polypeptide (e.g., PUMA BH3 multimeric polypeptide), wherein the ORF has been sequence optimized.

[0283] Exemplary sequence optimized nucleotide sequences encoding PUMA-BH3 multimer are shown in Table 12. In some embodiments, the sequence optimized PUMA-BH3 multimer sequences in Table 12, fragments, and variants thereof are used to practice the methods disclosed herein. In some embodiments, the sequence optimized PUMA-BH3 multimer sequences in Table 12, fragments and variants thereof are combined with or alternatives to the wild-type sequences disclosed herein.

TABLE 12
Sequence optimized sequences for PUMA-BH3 Multimers

| SEQ | |
|---|---|
| ID | |
| NO: | SEQUENCE |
| 300 | ATGGAGGAGCAGTGGGCGCGGGAGATAGGGGCCCAGCTAAGGCGGATGG |
| | CCGACGACCTAAACGCCCAATACGAAAGGAGGGGCTCGGGGGTCAAACA |
| | GACCCTCAATTTCGACCTCCTCAAGCTCGCGGGAGACGTCGAGAGCAACC |
| | CCGGCCCCGAGGAGCAGTGGGCGCGCGAAATAGGGGCCCAGCTCCGGCG |
| | CATGGCCGACGACCTCAACGCGCAATACGAGAGGCGCGGCAGCGGGGTA |
| | AAGCAAACGTTGAACTTCGACCTCCTCAAGCTCGCAGGGGACGTGGAGTC |
| | CAACCCCGGGCCCGAAGAACAATGGGCCCGGGAAATCGGCGCCCAGCTG |
| | CGCCGTATGGCTGACGACCTCAACGCGCAGTATGAACGCCGGGGGAAGC |
| | CCATCCCCAACCCCCTGCTCGGCCTCGATAGCACG |
| 301 | ATGGAGGAGCAGTGGGCCCGCGAGATAGGCGCCCAGCTCCGTAGGATGG |
| | CGGACGATCTAAACGCCCAGTACGAGAGGCGGGGCAGCGGGGTCAAACA |
| | GACATTGAATTTCGACCTCTTGAAGCTCGCCGGCGACGTGGAGAGCAACC |
| | CCGGGCCCGAGGAGCAGTGGGCGCGGGAGATCGGAGCCCAACTCAGGAG |
| | AATGGCCGACGACCTCAACGCCCAGTACGAGCGACGCGGTAGCGGGGTA |
| | AAGCAAACCCTCAACTTCGACCTCCTCAAGCTCGCCGGGGACGTTGAGTC |
| | CAATCCCGGGCCCGAAGAACAGTGGGCCCGGGAGATAGGCGCCCAGCTG |
| | CGTCGTATGGCCGACGATCTGAACGCCCAGTACGAGCGGAGAGGGAAGC |
| | CCATCCCGAACCCGTTGCTGGGGCTGGACAGCACC |
| 302 | ATGGAGGAACAGTGGGCCCGCGAGATCGGCGCCCAACTCCGGCGGATGG |
| | CCGACGATCTCAACGCCCAGTACGAGAGGCGGGGCTCCGGGGTTAAGCA |
| | AACCCTCAATTTCGACCTCCTCAAGCTTGCCGGGGACGTCGAAAGTAACC |
| | CCGGCCCGGAGGAACAGTGGGCCCGGGAGATAGGGGCGCAGCTACGCAG |
| | GATGGCCGACGATCTCAACGCCCAGTACGAGAGGAGGGGGTCGGGGGTC |
| | AAGCAGACCCTCAACTTCGACCTACTCAAGCTCGCCGGCGACGTGGAGAG |
| | CAACCCCGGGCCCGAAGAACAGTGGGCCCGGGAGATCGGGGCCCAGCTG |
| | AGACGGATGGCCGATGACCTGAACGCTCAGTACGAGCGGCGTGGGAAGC |
| | CCATCCCCAACCCCCTGCTGGGTTTAGACAGCACC |
| 303 | ATGGAGGAACAGTGGGCCCGCGAGATCGGCGCCCAGCTCCGCCGCATGG |
| | CGGACGATCTTAACGCCCAATACGAGAGGAGGGGGTCCGGCGTCAAGCA |
| | GACCCTCAACTTCGACCTCCTCAAACTCGCCGGAGACGTCGAGTCCAACC |
| | CCGGTCCCGAAGAACAGTGGGCCCGGGAAATCGGGGCCCAGCTCCGCCG |
| | CATGGCAGACGATCTCAACGCCCAGTACGAGCGGCGCGGGTCCGGGGTC |
| | AAGCAGACTCTCAACTTCGATCTTCTCAAGTTAGCGGGGGACGTGGAGTC |
| | CAATCCAGGTCCGGAGGAGCAGTGGGCCCGGGAGATAGGGGCCCAGCTC |
| | CGCCGAATGGCCGACGACCTGAACGCTCAATATGAGCGCCGGGGGAAAC |
| | CCATCCCCAACCCGCTGCTCGGGCTGGATAGCACT |
| 304 | ATGGAGGAGCAGTGGGCAAGGGAGATAGGAGCTCAGCTCAGGCGGATGG |
| | CCGACGACCTCAACGCGCAGTACGAACGGCGGGGATCCGGAGTCAAACA |
| | GACATTGAATTTCGACCTTCTCAAACTCGCCGGCGACGTTGAGAGCAATC |
| | CCGGGCCCGAGGAACAGTGGGCGCGGGAAATCGGCGCCCAGCTAAGGCG |
| | GATGGCCGACGACCTAAACGCCCAATACGAGCGGCGGGGGTCCGGCGTG |
| | AAGCAGACCCTAAACTTCGACCTCCTGAAGCTTGCCGGGGACGTGGAGAG |
| | CAATCCCGGCCCCGAAGAACAGTGGGCCCGGGAGATCGGGGCCCAGCTG |
| | CGGCGCATGGCTGACGACCTCAACGCCCAGTACGAGCGGCGGGGGAAGC |
| | CCATCCCCAACCCGCTCCTGGGTCTGGACAGCACA |
| 305 | ATGGAGGAACAGTGGGCCAGGGAAATCGGGGCCCAGCTAAGGAGGATGG |
| | CCGACGACCTAAACGCCCAGTACGAACGGCGAGGTAGCGGGGTCAAGCA |
| | GACTCTCAACTTCGACCTCTTGAAACTCGCCGGGGACGTCGAGTCGAATC |
| | CAGGCCCCGAGGAGCAGTGGGCACGAGAAATAGGGGCCCAGCTACGCCG |
| | CATGGCGGACGACCTCAACGCTCAATACGAGCGAAGAGGATCCGGCGTA |
| | AAACAGACGTTGAACTTCGACCTCCTCAAGCTCGCCGGGGACGTAGAGTC |
| | CAATCCGGGCCCTGAGGAACAGTGGGCCCGGGAGATCGGGGCCCAGCTG |
| | CGCCGAATGGCGGACGATCTGAATGCCCAGTATGAGAGGAGGGGGAAGC |
| | CCATCCCAAATCCACTGCTGGGTCTGGATTCGACA |
| 306 | ATGGAGGAGCAGTGGGCGCGAGAGATCGGCGCCCAGCTCCGTAGGATGG |
| | CAGACGACTTAAACGCCCAATACGAACGCCGGGGGAGCGGCGTCAAACA |
| | GACGCTCAACTTCGACTTACTAAAACTAGCCGGCGACGTTGAGAGCAATC |
| | CCGGGCCCGAGGAGCAGTGGGCCCGGGAGATAGGCGCGCAGCTTCGCCG |
| | CATGGCGGACGACCTCAACGCCCAATACGAGCGCCGCGGGTCCGGGGTC |
| | AAGCAGACGCTCAACTTCGACCTCCTCAAACTGGCCGGAGACGTGGAGAG |
| | CAACCCCGGCCCCGAGGAGCAGTGGGCCCGCGAAATCGGGGCCCAGCTG |
| | CGCAGAATGGCGGACGACCTGAACGCGCAGTATGAGCGACGGGGGAAGC |
| | CCATCCCGAACCCCCTGCTCGGACTCGACTCCACT |
| 307 | ATGGAGGAGCAGTGGGCCAGGGAGATCGGCGCACAGCTCCGCCGCATGG |
| | CGGACGACCTCAACGCCCAATACGAACGACGGGGGTCCGGGGTCAAACA |
| | GACGCTCAACTTCGACCTCCTTAAACTCGCCGGCGACGTAGAGTCTAACC |
| | CCGGCCCCGAGGAGCAGTGGGCCCGGGAGATAGGGGCCCAGCTCCGGCG |
| | GATGGCCGACGATCTCAACGCCCAGTACGAGCGTAGGGGGAGCGGCGTT |
| | AAGCAAACGCTTAATTTCGACCTCCTCAAGCTCGCGGGCGACGTCGAGTC |
| | AAACCCCGGGCCAGAGGAGCAGTGGGCCCGTGAGATCGGTGCCCAGCTG |
| | AGGCGAATGGCCGATGACCTGAACGCCCAGTATGAGCGCCGTGGGAAGC |
| | CCATTCCGAATCCTCTCCTGGGTCTGGACAGCACC |
| 308 | ATGGAGGAACAGTGGGCTCGCGAGATCGGGGCTCAGCTCCGTAGGATGG |
| | CCGACGATCTCAACGCCCAGTACGAGCGCAGGGGGAGCGGCGTCAAGCA |
| | GACCTTGAATTTCGACCTCCTCAAGCTCGCCGGAGACGTCGAGTCCAACC |
| | CAGGGCCCGAGGAGCAGTGGGCCCGCGAGATCGGAGCCCAGCTCCGGAG |
| | GATGGCAGACGACTTGAACGCACAGTACGAGCGCCGGGGGTCCGGGGTT |
| | AAGCAAACCCTCAACTTCGACCTCCTTAAGCTGGCAGGCGACGTGGAGTC |
| | GAATCCCGGGCCCGAGGAGCAGTGGGCCAGGGAGATCGGCGCACAGCTG |
| | CGGCGCATGGCCGACGACCTGAACGCGCAGTATGAGCGCCGAGGTAAGC |
| | CCATCCCCAACCCCCTGCTTGGGCTGGACTCCACC |
| 309 | ATGGAGGAGCAGTGGGCCCGAGAGATCGGCGCCCAGCTCAGGCGGATGG |
| | CCGACGACCTTAACGCCCAGTACGAGCGGCGGGGGAGCGGGGTCAAGCA |
| | GACCCTTAATTTCGACCTTCTCAAACTGGCCGGGGACGTCGAGTCGAACC |
| | CCGGGCCAGAGGAGCAGTGGGCCAGGGAGATCGGAGCCCAATTACGACG |
| | GATGGCCGACGACCTCAACGCCCAATACGAGCGGAGGGGGTCCGGAGTC |
| | AAACAGACCCTCAACTTCGATCTCTTGAAGCTCGCAGGAGACGTCGAAAG |
| | CAATCCCGGGCCCGAAGAACAGTGGGCCCGGGAGATAGGGGCACAGCTC |
| | CGCAGGATGGCCGACGATCTGAACGCCCAGTACGAGCGTAGGGGTAAAC |
| | CTATCCCAAACCCACTTCTGGGGCTGGACAGCACT |
| 310 | ATGGAAGAACAGTGGGCTCGCGAGATCGGCGCTCAGCTCCGACGGATGG |
| | CCGACGACTTGAACGCGCAGTACGAGCGCCGGGGGAGCGGAGTCAAGCA |
| | GACACTCAACTTCGACCTCCTAAAGTTGGCGGGCGACGTGGAGAGCAACC |
| | CGGGGCCCGAGGAGCAGTGGGCGAGGGAGATAGGCGCCCAGCTGCGCCG |
| | GATGGCCGACGACTTGAACGCTCAATACGAGCGGAGGGGGTCCGGCGTC |
| | AAGCAGACGCTTAATTTCGACCTCCTCAAGCTCGCCGGCGACGTGGAATC |
| | CAACCCCGGCCCGGAGGAGCAGTGGGCCCGAGAAATCGGAGCCCAACTG |
| | CGGAGGATGGCTGACGACCTGAACGCCCAGTACGAGCGCCGAGGAAAGC |
| | CGATCCCCAACCCCCTGCTGGGACTGGACAGCACG |
| 311 | ATGGAGGAGCAGTGGGCCCGGGAAATCGGGGCCCAGTTACGCAGGATGG |
| | CCGACGATCTAAACGCCCAATACGAGAGGAGGGGCTCGGGGGTAAAACA |
| | GACCCTCAATTTCGATTTGCTCAAACTCGCCGGCGACGTCGAGAGTAACC |
| | CGGGCCCCGAGGAGCAGTGGGCCCGCGAGATCGGGGCGCAGCTCCGGCG |
| | GATGGCAGACGACCTCAACGCGCAGTACGAACGCCGGGGCTCCGGCGTC |
| | AAGCAAACGTTGAACTTCGACCTCCTCAAACTCGCCGGGGACGTAGAGAG |
| | CAACCCCGGGCCCGAGGAGCAGTGGGCTCGTGAGATTGGCGCCCAGCTAC |
| | GCCGTATGGCCGACGACCTCAACGCCCAGTACGAGAGGAGGGGTAAGCC |
| | GATCCCCAACCCCCTGCTGGGGCTGGACTCCACC |
| 312 | ATGGAGGAACAGTGGGCGCGAGAGATCGGGGCCCAGCTCAGGCGGATGG |
| | CCGACGATCTCAACGCCCAGTACGAACGGAGGGGTAGCGGGGTAAAGCA |
| | AACTCTAAACTTCGATCTCCTCAAGCTCGCCGGCGACGTAGAGTCCAATC |
| | CGGGGCCCGAGGAGCAGTGGGCGCGGGAGATCGGCGCCCAGCTCCGGAG |
| | GATGGCAGACGATCTCAACGCCCAGTACGAGCGGAGAGGCAGCGGGGTC |
| | AAACAGACCCTCAACTTCGATCTCCTAAAGCTCGCCGGGGACGTGGAGAG |
| | CAACCCCGGGCCCGAGGAGCAGTGGGCCCGCGAAATCGGTGCCCAGCTTC |
| | GACGTATGGCCGATGATCTGAACGCCCAATACGAGCGGCGCGGCAAACC |
| | CATTCCCAATCCGCTGCTCGGGCTGGACTCCACC |
| 313 | ATGGAGGAGCAGTGGGCCCGGGAAATCGGAGCCCAACTACGGCGCATGG |
| | CCGACGACCTCAACGCCCAATACGAGCGGAGGGGCTCGGGAGTCAAGCA |
| | GACTCTAAATTTCGACCTCCTCAAGCTCGCGGGCGACGTCGAGTCCAACC |
| | CCGGTCCCGAAGAACAGTGGGCACGAGAGATCGGCGCCCAGCTCCGGCG |
| | AATGGCGGACGACCTTAACGCCCAGTACGAGCGGCGGGGGAGCGGGGTC |
| | AAGCAAACACTCAACTTCGACCTACTCAAGCTCGCCGGGGACGTCGAGAG |
| | CAATCCCGGGCCCGAGGAACAGTGGGCCAGGGAGATTGGGGCCCAGCTG |
| | AGGAGGATGGCGGACGACCTGAACGCCCAGTACGAGAGGCGAGGCAAGC |
| | CGATCCCCAATCCCCTGCTGGGCCTGGATTCCACC |
| 314 | ATGGAGGAGCAGTGGGCGCGCGAGATAGGCGCCCAACTCCGTAGGATGG |
| | CCGACGATCTTAACGCCCAGTACGAGCGCCGGGGTAGCGGGGTGAAGCA |
| | GACCCTCAACTTCGACCTTCTCAAGCTTGCCGGGGACGTAGAAAGCAATC |
| | CCGGGCCCGAGGAGCAGTGGGCCAGGGAAATCGGGGCCCAGCTCCGCCG |
| | TATGGCCGACGACCTCAACGCGCAGTACGAGCGCCGAGGGTCGGGAGTC |
| | AAGCAGACCCTCAACTTCGATCTCCTCAAGCTCGCCGGCGACGTGGAAAG |
| | CAACCCGGGCCCCGAAGAACAGTGGGCCCGGGAGATTGGGGCACAGCTG |
| | AGGAGGATGGCCGACGATCTGAACGCCCAGTACGAACGGCGGGGCAAGC |
| | CCATCCCAAACCCGCTGCTAGGACTGGACTCAACG |
| 315 | ATGGAGGAGCAGTGGGCACGAGAAATCGGCGCCCAGCTTCGTCGGATGG |
| | CCGACGATCTCAACGCGCAGTACGAGAGGCGGGGCTCGGGAGTCAAACA |
| | GACCCTCAACTTCGACCTCCTCAAGCTCGCCGGCGACGTCGAGTCCAACC |
| | CGGGCCCGGAAGAACAGTGGGCCAGAGAGATCGGGGCCCAGCTAAGGCG |
| | TATGGCCGACGATCTCAACGCCCAGTACGAGCGGAGGGGCTCCGGCGTCA |
| | AGCAGACCCTTAATTTCGATCTCTTGAAGCTCGCCGGGGACGTCGAAAGC |
| | AATCCCGGGCCCGAGGAACAGTGGGCCCGGGAAATCGGTGCACAGCTCA |
| | GGCGCATGGCGGATGATCTCAACGCCCAATACGAGCGCCGGGGCAAACC |
| | CATACCTAACCCCCTGCTCGGTCTGGACTCCACC |
| 316 | ATGGAGGAGCAGTGGGCGCGGGAGATCGGGGCGCAGCTAAGGAGGATGG |
| | CGGACGATCTCAACGCGCAGTACGAAAGGCGCGGCAGCGGCGTGAAGCA |
| | GACGCTCAACTTCGACCTACTCAAGCTCGCGGGGGACGTCGAATCGAACC |
| | CCGGCCCGGAGGAACAGTGGGCCAGGGAGATCGGCGCCCAGCTACGGCG |
| | TATGGCCGACGACCTCAACGCCCAATACGAGAGGAGGGGGTCGGGAGTC |
| | AAACAGACCCTAAACTTCGACCTCCTCAAGCTCGCCGGGGACGTCGAGTC |
| | CAACCCCGGTCCCGAGGAGCAGTGGGCCAGGGAAATCGGGGCGCAACTG |
| | CGCCGCATGGCCGACGATCTGAACGCCCAGTATGAGCGCAGGGGCAAGC |
| | CGATCCCGAATCCGCTGCTAGGTCTGGACTCCACC |
| 317 | ATGGAGGAGCAGTGGGCCCGCGAGATCGGCGCACAGCTCCGACGAATGG |
| | CCGACGATCTCAACGCCCAATACGAACGGCGGGGGAGCGGAGTCAAGCA |
| | GACTTTAAACTTCGACCTCCTCAAGCTTGCCGGGGACGTGGAAAGTAACC |
| | CCGGACCGGAGGAGCAGTGGGCCCGCGAGATAGGAGCGCAGCTCAGGCG |
| | CATGGCCGACGATCTCAACGCCCAATACGAGCGGAGGGGAAGCGGGGTA |
| | AAACAGACGCTCAACTTCGACCTCCTCAAATTAGCCGGCGACGTGGAGAG |
| | CAACCCCGGGCCCGAGGAGCAGTGGGCCCGCGAGATAGGGGCCCAACTG |
| | CGGCGCATGGCGGACGACCTGAACGCCCAGTACGAGAGGCGGGGCAAGC |
| | CGATCCCTAACCCCCTGCTGGGGTTGGACTCCACC |
| 318 | ATGGAAGAACAGTGGGCACGGGAGATCGGCGCACAGCTAAGGAGGATGG |
| | CCGACGACCTTAACGCGCAGTACGAGCGCAGAGGGAGCGGCGTCAAGCA |
| | GACGCTCAATTTCGACCTTCTCAAGCTCGCGGGGGACGTTGAGTCCAATC |
| | CCGGACCCGAGGAGCAGTGGGCCCGCGAGATAGGGGCCCAGCTCCGGCG |
| | GATGGCAGACGATCTCAACGCCCAATACGAGAGGAGGGGGTCGGGGGTC |
| | AAACAGACCCTTAACTTCGACCTCCTCAAGCTCGCCGGGGACGTCGAGAG |
| | TAACCCCGGACCGGAGGAGCAGTGGGCCCGGGAAATTGGCGCCCAACTC |
| | AGGCGGATGGCCGATGATCTCAACGCCCAGTACGAACGTCGGGGTAAGC |
| | CCATCCCGAACCCCCTGCTGGGGCTGGACTCGACC |
| 319 | ATGGAGGAGCAGTGGGCAAGGGAGATAGGCGCACAGCTCCGTCGGATGG |
| | CCGACGACCTGAACGCCCAATACGAGCGGAGAGGGTCCGGGGTCAAGCA |
| | GACCCTCAATTTCGACTTGCTCAAGCTGGCAGGGGACGTCGAAAGCAACC |
| | CCGGCCCGGAGGAGCAGTGGGCGCGCGAGATCGGCGCCCAGCTTAGGCG |
| | GATGGCCGACGACTTAAACGCGCAATACGAGCGCCGCGGCAGCGGGGTC |
| | AAACAGACCCTAAACTTCGACCTCCTCAAGCTCGCCGGCGACGTGGAGAG |
| | CAACCCCGGCCCCGAAGAACAGTGGGCCCGCGAGATCGGGGCGCAGCTG |
| | CGTAGAATGGCCGACGATCTGAACGCCCAGTATGAGAGGCGGGGCAAAC |
| | CTATCCCGAATCCACTGCTGGGCCTGGACAGCACA |
| 320 | ATGGAGGAACAGTGGGCTCGCGAGATAGGCGCCCAGCTCCGCAGAATGG |
| | CCGACGATCTTAACGCCCAATACGAACGGCGGGGGTCCGGGGTCAAGCA |
| | GACGTTAAACTTCGACCTCCTCAAACTCGCCGGGGACGTGGAGTCCAACC |
| | CCGGGCCCGAGGAGCAGTGGGCGCGCGAGATCGGGGCCCAGCTCCGACG |
| | GATGGCCGACGACCTCAACGCGCAGTACGAGCGCAGAGGAAGCGGGGTC |
| | AAGCAGACCCTCAACTTCGATCTCCTCAAGTTGGCGGGCGACGTTGAAAG |
| | CAACCCCGGACCGGAGGAGCAATGGGCCCGCGAGATCGGGGCCCAACTC |
| | AGGAGGATGGCGGACGACCTGAACGCCCAGTACGAACGGAGGGGGAAAC |
| | CTATCCCCAACCCTCTACTGGGGCTGGACTCTACG |
| 321 | ATGGAGGAACAGTGGGCCCGCGAGATCGGCGCCCAACTCCGTAGGATGG |
| | CCGACGATCTCAACGCCCAGTACGAGAGGAGGGGGAGCGGGGTCAAGCA |
| | GACGCTCAACTTCGACCTCCTCAAGCTCGCCGGGGACGTCGAGTCCAACC |
| | CGGGTCCAGAGGAGCAGTGGGCGAGGGAAATCGGCGCCCAGCTCCGTCG |
| | GATGGCCGACGACCTAAACGCGCAGTACGAGAGGAGGGGTTCCGGCGTT |
| | AAACAAACGCTCAACTTCGACCTCCTCAAACTCGCCGGGGACGTCGAGAG |
| | CAACCCCGGACCCGAGGAGCAGTGGGCTCGGGAGATTGGGGCCCAGCTG |
| | AGGCGGATGGCCGATGACCTGAATGCGCAGTACGAGCGCCGCGGAAAAC |
| | CCATCCCTAACCCGCTGCTCGGCCTGGACTCCACC |
| 322 | ATGGAGGAGCAGTGGGCCCGAGAAATAGGGGCCCAGCTCAGGAGGATGG |
| | CCGACGACCTCAACGCCCAATACGAAAGGAGGGGGTCGGGCGTCAAGCA |
| | GACCCTTAATTTCGACTTGCTTAAGCTTGCCGGGGACGTAGAATCCAACC |
| | CGGGACCCGAGGAGCAGTGGGCCCGAGAAATCGGAGCCCAGCTCCGCCG |
| | AATGGCGGACGATCTCAACGCCCAATACGAGAGGAGGGGATCCGGCGTC |
| | AAGCAGACGCTCAATTTCGACCTCCTCAAACTCGCCGGCGACGTTGAATC |
| | AAACCCGGGGCCGGAAGAACAGTGGGCCAGAGAGATCGGCGCACAGCTG |
| | CGCCGAATGGCCGATGACCTGAACGCCCAGTACGAGCGCCGGGGCAAGC |
| | CCATACCGAACCCCCTCCTGGGCCTGGACTCCACC |
| 323 | ATGGAGGAGCAGTGGGCCCGCGAAATCGGCGCCCAGCTCCGGAGAATGG |
| | CCGACGACCTTAACGCCCAGTACGAAAGGAGGGGCAGCGGGGTCAAACA |
| | GACGCTAAACTTCGACCTCCTCAAGCTCGCCGGGGACGTTGAGTCCAACC |
| | CCGGGCCGGAGGAACAGTGGGCGCGGGAGATCGGGGCGCAGCTTAGGCG |
| | AATGGCCGACGACCTAAACGCCCAGTACGAGCGCAGGGGGTCGGGCGTC |
| | AAGCAGACCCTCAACTTCGACCTCCTTAAACTCGCGGGGGACGTCGAGAG |
| | CAATCCGGGGCCGGAAGAACAGTGGGCTCGGGAGATTGGCGCCCAGCTG |
| | CGGCGCATGGCCGATGACCTGAACGCCCAGTATGAACGCCGCGGTAAGCC |
| | CATCCCGAACCCGCTGCTGGGTCTGGATAGCACC |
| 324 | ATGGAGGAACAGTGGGCCCGGGAGATCGGCGCCCAGCTCAGGCGGATGG |
| | CGGACGACCTCAACGCCCAGTACGAGCGGAGGGGGAGCGGGGTCAAGCA |
| | AACCCTCAATTTCGACCTCCTCAAGTTGGCCGGCGACGTGGAGTCGAACC |
| | CCGGGCCCGAGGAACAGTGGGCCCGCGAGATAGGGGCACAGCTCCGCAG |
| | GATGGCCGACGACCTTAACGCGCAGTACGAGAGGAGGGGCTCGGGAGTT |
| | AAGCAGACCCTCAATTTCGATCTCCTCAAACTAGCCGGGGACGTAGAAAG |
| | CAACCCCGGCCCCGAGGAGCAGTGGGCCCGAGAAATCGGCGCGCAGCTG |
| | AGAAGGATGGCTGACGACCTGAACGCGCAGTATGAGAGACGGGGGAAGC |
| | CGATCCCCAACCCCCTCCTCGGGTTGGACTCCACC |

[0284] The sequence optimized nucleotide sequences disclosed herein are distinct from the corresponding wild type nucleotide acid sequences and from other known sequence optimized nucleotide sequences, e.g., these sequence optimized nucleic acids have unique compositional characteristics.

[0285] In some embodiments, the percentage of uracil or thymine nucleobases in a sequence optimized nucleotide sequence (e.g., encoding a BH3 polypeptide, a functional fragment, or a variant thereof) is modified (e.g, reduced) with respect to the percentage of uracil or thymine nucleobases in the reference wild-type nucleotide sequence. Such a sequence is referred to as a uracil-modified or thymine-modified sequence. The percentage of uracil or thymine content in a nucleotide sequence can be determined by dividing the number of uracils or thymines in a sequence by the total number of nucleotides and multiplying by 100. In some embodiments, the sequence optimized nucleotide sequence has a lower uracil or thymine content than the uracil or thymine content in the reference wild-type sequence. In some embodiments, the uracil or thymine content in a sequence-optimized nucleotide sequence of the invention is greater than the uracil or thymine content in the reference wild-type sequence and still maintain beneficial effects, e.g., increased expression and/or reduced Toll-Like Receptor (TLR) response when compared to the reference wild-type sequence.

[0286] As shown in Table 13B, the uracil or thymine content of wild-type PUMA-BH3 multimer is about 13.75%. In some embodiments, the uracil or thymine content of a uracil- or thymine-modified sequence encoding a PUMA-BH3 multimer polypeptide is less than 13.75%. In some embodiments, the uracil or thymine content of a uracil- or thymine-modified sequence encoding a PUMA-BH3 multimer polypeptide of the invention is less than 19%, less that 18%, less than 17%, less than 16%, less than 15%, less than 14%, less than 13%, less than 12%, less than 11%, or less than 10%. In some embodiments, the uracil or thymine content is not less than 18%, 17%, 16%, 15%, 14%, 13%, 12%, 11%, or 10%. The uracil or thymine content of a sequence disclosed herein, i.e., its total uracil or thymine content is abbreviated herein as % U_{TL} or % T_{TL}.

TABLE 13A

| | |
|---|---|
| PumaBH3 | MEEQWAREIGAQLRRMADDLNAQYERRGSGVKQTLNFD |
| (x3P2A).v5 | LLKLAGDVESNPGPEEQWAREIGAQLRRMADDLNAQYE |
| | RRGSGVKQTLNFDLLKLAGDVESNPGPEEQWAREIGAQ |
| | LRRMADDLNAQYERRGKPIPNPLLGLDST |
| | (SEQ ID NO: 370) |
| PumaBH3 | ATGGAGGAGCAATGGGCTAGAGAGATCGGCGCACAGCT |
| (x3P2A).v5 | GCGGCGCATGGCCGATGATCTGAACGCCCAATACGAGA |
| | GGAGAGGTTCCGGAGTGAAGCAGACTCTGAACTTCGAT |
| | CTGCTCAAGCTTGCGGGCGACGTGGAATCGAACCCCGG |
| | CCCTGAGGAACAATGGGCGCGCGAAATCGGTGCCCAGC |
| | TCCGCCGGATGGCAGACGACCTGAACGCGCAGTACGAG |
| | CGGCGGGGGAGCGGGGTCAAGCAGACCCTGAATTTCGA |
| | CCTTCTGAAGCTGGCCGGAGATGTGGAGTCAAACCCGG |
| | GACCCGAAGAACAGTGGGCCAGGGAAATTGGAGCTCAG |
| | CTGCGGAGAATGGCCGACGACCTCAACGCCCAGTACGA |
| | ACGGCGCGGAAAACCTATCCCGAACCCACTCTTGGGCC |
| | TGGACTCCACC (SEQ ID NO: 371) |

TABLE 13B

| | | | Th. Min. | Th. Min. U |
|---|---|---|---|---|
| Protein | | Length | U (%) | (abs) |
| PumaBH3 | MEEQWA | 143 | 9.09 | 39 |
| (x3P2A).v5 | | | | |

| | | | Th. Max. | Th. Max. |
|---|---|---|---|---|
| Protein | | Length | G (%) | G (abs) |
| PumaBH3 | MEEQWA | 143 | 47.09 | 202 |
| (x3P2A).v5 | | | | |
| | | | Th. Max. | Th. Max. |
| Protein | | Length | C (%) | C (abs) |
| PumaBH3 | MEEQWA | 143 | 43.12 | 185 |
| (x3P2A).v5 | | | | |
| | | | Th. Max. | Th. Max. |
| Protein | | Length | GC (%) | GC (abs) |
| PumaBH3 | MEEQWA | 143 | 72.03 | 309 |
| (x3P2A).v5 | | | | |

| | | | U | U | U Content | | UU | | | |
|---|---|---|---|---|---|---|---|---|---|---|
| Nucleic | | | Content | Content | v Th. Min | UU | pairs v | | | |
| Acid | | Length | (abs) | (%) | (%) | Pairs | WT (%) | UUU | UUUU | UUUUU |
| PumaBH3 | ATGGAGG | 429 | 59 | 13.75 | 151.28 | 6 | 40.00 | 1 | 0 | 0 |
| (x3P2A).v5 | | | | | | | | | | |

| | | | G | G | G Content |
|---|---|---|---|---|---|
| Nucleic | | | Content | Content | v Th. Max |
| Acid | | Length | (abs) | (%) | (%) |
| PumaBH3 | ATGGAGG | 429 | 144 | 33.57 | 68.15 |
| (x3P2A).v5 | | | | | |
| | | | C | C | C Content |
| Nucleic | | | Content | Content | v Th. Max |
| Acid | | Length | (abs) | (%) | (%) |
| PumaBH3 | ATGGAGG | 429 | 121 | 28.21 | 52.05 |
| (x3P2A).v5 | | | | | |
| | | | | | GC |
| | | | GC | GC | Content v |
| Nucleic | | | Content | Content | Th. Max |
| Acid | | Length | (abs) | (%) | (%) |
| PumaBH3 | ATGGAGG | 429 | 265 | 61.77 | 74.69 |
| (x3P2A).v5 | | | | | |

[0287] In some embodiments, the uracil or thymine content (% U_{TL} or % T_{TL}) of a uracil- or thymine-modified sequence encoding a multimer polypeptide of the invention (e.g., PUMA-BH3 multimer polypeptide) is between 10% and 20%, between 11% and 20%, between 11.5% and 19.5%, between 12% and 19%, between 12.5% and 18.5%, between 13% and 18%, between 13% and 17%, between 13% and 16.5%, between 13% and 16%, between 13% and 15.5%, between 13% and 15%, or between 13% and 14.5%.

[0288] In some embodiments, the uracil or thymine content (% U_{TL} or % T_{TL}) of a uracil- or thymine-modified sequence encoding a multimer polypeptide of the invention (e.g., PUMA-BH3 multimer polypeptide) is between 12% and 15.5%, between 12.1% and 15.4%, between 12.2% and 15.3%, between 12.3% and 15.2%, between 12.4% and 15.1%, between 12.5% and 15%, between 12.6% and 14.9%, between 12.7% and 14.8%, between 12.8% and 14.7%, between 12.9% and 14.6%, or between 13% and 14.5%.

[0289] In a particular embodiment, the uracil or thymine content (% U_{TL} or % T_{TL}) of a uracil- or thymine modified sequence encoding a multimer polypeptide of the invention (e.g., PUMA-BH3 multimer polypeptide is between about 13% and about 15%, e.g., between 13.02% and 14.5%.

[0290] A uracil- or thymine-modified sequence encoding a polypeptide of the invention (e.g., a BH3 polypeptide, e.g., PUMA-BH3 multimer) can also be described according to its uracil or thymine content relative to the uracil or thymine content in the corresponding wild-type nucleic acid sequence (% U_{WT} or % T_{WT}), or according to its uracil or thymine content relative to the theoretical minimum uracil or thymine content of a nucleic acid encoding the wild-type protein sequence (% U_{TM} or (% T_{TM}).

[0291] The phrases “uracil or thymine content relative to the uracil or thymine content in the wild type nucleic acid sequence,” refers to a parameter determined by dividing the number of uracils or thymines in a sequence-optimized nucleic acid by the total number of uracils or thymines in the corresponding wild-type nucleic acid sequence and multiplying by 100. This parameter is abbreviated herein as % U_{WT} or % T_{WT}.

[0292] In some embodiments, the % U_{WT} or % T_{WT} of a uracil- or thymine-modified sequence encoding a polypeptide of the invention (e.g., a BH3 polypeptide, e.g., PUMA-BH3 multimer) is above 50%, above 55%, above 60%, above 65%, above 70%, above 75%, above 80%, above 85%, above 90%, or above 95%.

[0293] In some embodiments, the % U_{WT} or % T_{WT} of a uracil- or thymine modified sequence encoding a polypeptide of the invention (e.g., a BH3 polypeptide, e.g., PUMA-BH3 multimer) is between 55% and 85%, between 56% and 84%, between 57% and 83%, between 58% and 82%, between 59% and 81%, between 60% and 80%, between 61% and 79%, between 62% and 78%, between 63% and 77%, between 64% and 76%, between 65% and 75%, or between 65% and 74%.

[0294] In some embodiments, the % U_{WT} or % T_{WT} of a uracil- or thymine-modified sequence encoding a polypeptide of the invention (e.g., a BH3 polypeptide, e.g., PUMA-BH3 multimer) is between 63% and 75%, between 63.2% and 74.8%, between 63.4% and 74.6%, between 63.6% and 74.4%, between 63.8% and 74.2%, between 64% and 74%, between 64.2% and 73.8%, between 64.4% and 73.6%, between 64.6% and 73.4%, between 64.8% and 73.2%, or between 65% and 73%.

[0295] In a particular embodiment, the % U_{WT} or % T_{WT} of a uracil- or thymine-modified sequence encoding a polypeptide of the invention (e.g., a BH3 polypeptide, e.g., PUMA-BH3 multimer) is between about 65% and about 73%, e.g., between 65.58% and 73.02%.

[0296] Uracil- or thymine-content relative to the uracil or thymine theoretical minimum, refers to a parameter determined by dividing the number of uracils or thymines in a sequence-optimized nucleotide sequence by the total number of uracils or thymines in a hypothetical nucleotide sequence in which all the codons in the hypothetical sequence are replaced with synonymous codons having the lowest possible uracil or thymine content and multiplying by 100. This parameter is abbreviated herein as % U_{TM} or % T_{TM}.

[0297] For DNA it is recognized that thymine is present instead of uracil, and one would substitute T where U appears. Thus, all the disclosures related to, e.g., % U_{TM}, % U_{WT}, or % U_{TL}, with respect to RNA are equally applicable to % T_{TM}, % T_{WT}, or % T_{TL} with respect to DNA.

[0298] In some embodiments, the % U_{TM} of a uracil-modified sequence encoding a polypeptide of the invention (e.g., a BH3 polypeptide, e.g., PUMA-BH3 multimer) is below 300%, below 295%, below 290%, below 285%, below 280%, below 275%, below 270%, below 265%, below 260%, below 255%, below 250%, below 245%, below 240%, below 235%, below 230%, below 225%, below 220%, below 215%, below 200%, below 195%, below 190%, below 185%, below 180%, below 175%, below 170%, below 165%, below 160%, below 155%, below 150%, below 145%, below 140%, below 139%, below 138%, below 137%, below 136%, below 135%, below 134%, below 133%, below 132%, below 131%, below 130%, below 129%, below 128%, below 127%, below 126%, below 125%, below 124%, below 123%, below 122%, below 121%, below 120%, below 119%, below 118%, below 117%, below 116%, or below 115%.

[0299] In some embodiments, the % U_{TM} of a uracil-modified sequence encoding a polypeptide of the invention (e.g., a BH3 polypeptide, e.g., PUMA-BH3 multimer) is above 100%, above 101%, above 102%, above 103%, above 104%, above 105%, above 106%, above 107%, above 108%, above 109%, above 110%, above 111%, above 112%, above 113%, above 114%, above 115%, above 116%, above 117%, above 118%, above 119%, above 120%, above 121%, above 122%, above 123%, above 124%, above 125%, or above 126%, above 127%, above 128%, above 129%, or above 130%, above 135%, above 130%, above 131%, above 132%, above 133%, above 134%, or above 135%.

[0300] In some embodiments, the % U_{TM} of a uracil-modified sequence encoding a polypeptide of the invention (e.g., a BH3 polypeptide, e.g., PUMA-BH3 multimer) is between 125% and 127%, between 124% and 128%, between 123% and 129%, between 122% and 130%, between 121% and 131%, between 120% and 132%, between 119% and 133%, between 118% and 134%, between 117% and 135%, between 116% and 136%, between 115% and 137%, between 114% and 138%, or between 113% and 139%.

[0301] In some embodiments, a uracil-modified sequence encoding aa polypeptide of the invention (e.g., a BH3 polypeptide, e.g., PUMA-BH3 multimer) has a reduced number of consecutive uracils with respect to the corresponding wild-type nucleic acid sequence. For example, two consecutive leucines can be encoded by the sequence CUUUUG, which includes a four uracil cluster. Such a subsequence can be substituted, e.g., with CUGCUC, which removes the uracil cluster.

[0302] Phenylalanine can be encoded by UUC or UUU. Thus, even if phenylalanines encoded by UUU are replaced by UUC, the synonymous codon still contains a uracil pair (UU). Accordingly, the number of phenylalanines in a sequence establishes a minimum number of uracil pairs (UU) that cannot be eliminated without altering the number of phenylalanines in the encoded polypeptide. For example, if the polypeptide (e.g., wild type PUMA-BH3 multimer) has, e.g., 7, 8, or 9 phenylalanines, the absolute minimum number of uracil pairs (UU) in that a uracil-modified sequence encoding the polypeptide (e.g., wild type PUMA-BH3 multimer) can contain is 7, 8, or 9, respectively.

[0303] Wild type PUMA-BH3 multimer contains 6 uracil pairs (UU), and one uracil triplet (UUU). In some embodiments, a uracil-modified sequence encoding a PUMA-BH3 multimer polypeptide of the invention has a reduced number of uracil triplets (UUU) with respect to the wild-type nucleic acid sequence. In some embodiments, a uracil-modified sequence encoding a PUMA-BH3 multimer polypeptide of the invention contains 1 or no uracil triplets (UUU).

[0304] In some embodiments, a uracil-modified sequence encoding a PUMA-BH3 multimer polypeptide has a reduced number of uracil pairs (UU) with respect to the number of uracil pairs (UU) in the wild-type nucleic acid sequence. In some embodiments, a uracil-modified sequence encoding a PUMA-BH3 multimer polypeptide of the invention has a number of uracil pairs (UU) corresponding to the minimum possible number of uracil pairs (UU) in the wild-type nucleic acid sequence, e.g., 4 uracil pairs in the case of wild type PUMA-BH3 multimer.

[0305] In some embodiments, a uracil-modified sequence encoding a PUMA-BH3 multimer polypeptide of the invention has at least 1, 2, 3, 4, or 5 uracil pairs (UU) less than the number of uracil pairs (UU) in the wild-type nucleic acid sequence. In some embodiments, a uracil-modified sequence encoding a PUMA-BH3 multimer polypeptide of the invention has between 3 and 5 uracil pairs (UU).

[0306] The phrase “uracil pairs (UU) relative to the uracil pairs (UU) in the wild type nucleic acid sequence,” refers to a parameter determined by dividing the number of uracil pairs (UU) in a sequence-optimized nucleotide sequence by the total number of uracil pairs (UU) in the corresponding wild-type nucleotide sequence and multiplying by 100. This parameter is abbreviated herein as % UU_{wt}.

[0307] In some embodiments, a uracil-modified sequence encoding a polypeptide of the invention (e.g., a BH3 polypeptide, e.g., PUMA-BH3 multimer) has a % UU_{wt} less than 40%, less than 30%, or less than 20%. In some embodiments, a uracil-modified sequence encoding a multimer polypeptide (e.g., PUMA-BH3 multimer) has a % UU_{wt} between 20% and 40% In a particular embodiment, a uracil-modified sequence encoding a multimer polypeptide of the invention (e.g., PUMA-BH3 multimer) has a % UU_{wt} between 25% and 35%.

[0308] In some embodiments, the polynucleotide of the invention comprises a uracil-modified sequence encoding an intracellular binding polypeptide (e.g., PUMA-BH3 multimer polypeptide) disclosed herein. In some embodiments, the uracil-modified sequence encoding an intracellular binding polypeptide comprises at least one chemically modified nucleobase, e.g., 5-methoxyuracil. In some embodiments, at least 95% of a nucleobase (e.g., uracil) in a uracil-modified sequence encoding an intracellular binding polypeptide of the disclosure are modified nucleobases. In some embodiments, at least 95% of uracil in a uracil-modified sequence encoding an intracellular binding polypeptide is 5-methoxyuracil. In some embodiments, the polynucleotide comprising a uracil-modified sequence further comprises a miRNA binding site, e.g., a miRNA binding site that binds to miR-142. In some embodiments, the polynucleotide comprising a uracil-modified sequence is formulated with a delivery agent, e.g., a compound having Formula (I), e.g., any of Compounds 1-147.

[0309] In some embodiments, the “guanine content of the sequence optimized ORF encoding intracellular binding polypeptide with respect to the theoretical maximum guanine content of a nucleotide sequence encoding the intracellular binding polypeptide,” abbreviated as % G_{TMX} is at least 71%, at least 75%, at least about 80%, at least about 85%, at least about 90%, at least about 95%, or about 100%. In some embodiments, the % G_{TMX} is between about 71% and about 79%, between about 71% and about 78%, or between about 71% and about 77%.

[0310] In some embodiments, the “cytosine content of the ORF relative to the theoretical maximum cytosine content of a nucleotide sequence encoding the intracellular binding polypeptide,” abbreviated as % C_{TMX}, is at least 65%, at least about 70%, at least about 75%, at least about 80%, at least about 85%, at least about 90%, at least about 95%, or about 100%. In some embodiments, the % C_{TMX} is between about 65% and about 80%, between about 66% and about 80%, between about 67% and about 79%, or between about 68% and about 76%.

[0311] In some embodiments, the “guanine and cytosine content (G/C) of the ORF relative to the theoretical maximum G/C content in a nucleotide sequence encoding the intracellular binding polypeptide,” abbreviated as % G/C_{TMX} is at least about 86%, at least about 90%, at least about 95%, or about 100%. The % G/C_{TMX} is between about 86% and about 100%, between about 87% and about 99%, between about 90% and about 97%, or between about 91% and about 96%.

[0312] In some embodiments, the “G/C content in the ORF relative to the G/C content in the corresponding wild-type ORF,” abbreviated as % G/C_{WT} is at least 61%, at least 62%, at least 63%, at least 64%, at least 65%, at least 66%, at least 67%, at least 70, or at least 75%.

[0313] In some embodiments, the average G/C content in the 3rd codon position in the ORF is at least 20%, at least 21%, at least 22%, at least 23%, at least 24%, at least 25%, at least 26%, at least 27%, at least 28%, at least 29%, or at least 30% higher than the average G/C content in the 3rd codon position in the corresponding wild-type ORF.

[0314] In some embodiments, the polynucleotide of the invention comprises an open reading frame (ORF) encoding an intracellular binding polypeptide (e.g., PUMA-BH3 multimer), wherein the ORF has been sequence optimized, and wherein each of % U_{TL}, % U_{WT}, % U_{TM}, % G_{TL}, % G_{WT}, % G_{TMX}, % C_{TL}, % C_{WT}, % C_{TMX}, % G/C_{TL}, % G/C_{WT}, or % G/C_{TMX}, alone or in a combination thereof is in a range between (i) a maximum corresponding to the parameter's maximum value (MAX) plus about 0.5, 1, 1.5, 2, 2.5, 3, 3.5, 4, 4.5, 5, 5.5, 6, 6.5, 7, 7.5, 8, 8.5, 9, 9.5, or 10 standard deviations (STD DEV), and (ii) a minimum corresponding to the parameter's minimum value (MIN) less 0.5, 1, 1.5, 2, 2.5, 3, 3.5, 4, 4.5, 5, 5.5, 6, 6.5, 7, 7.5, 8, 8.5, 9, 9.5, or 10 standard deviations (STD DEV).

### Methods for Sequence Optimization

[0315] In some embodiments, a polynucleotide of the invention (e.g., a polynucleotide comprising a nucleotide sequence encoding a BH3 polypeptide, e.g., the wild-type sequence, functional fragment, or variant thereof) is sequence optimized. A sequence optimized nucleotide sequence (nucleotide sequence is also referred to as “nucleic acid” herein) comprises at least one codon modification with respect to a reference sequence (e.g., a wild-type sequence encoding a BH3 polypeptide). Thus, in a sequence optimized nucleic acid, at least one codon is different from a corresponding codon in a reference sequence (e.g., a wild-type sequence).

[0316] In general, sequence optimized nucleic acids are generated by at least a step comprising substituting codons in a reference sequence with synonymous codons (i.e., codons that encode the same amino acid). Such substitutions can be effected, for example, by applying a codon substitution map (i.e., a table providing the codons that will encode each amino acid in the codon optimized sequence), or by applying a set of rules (e.g., if glycine is next to neutral amino acid, glycine would be encoded by a certain codon, but if it is next to a polar amino acid, it would be encoded by another codon). In addition to codon substitutions (i.e., “codon optimization”) the sequence optimization methods disclosed herein comprise additional optimization steps which are not strictly directed to codon optimization such as the removal of deleterious motifs (destabilizing motif substitution). Compositions and formulations comprising these sequence optimized nucleic acids (e.g., a RNA, e.g., a mRNA) can be administered to a subject in need thereof to facilitate in vivo expression of functionally active polypeptides (e.g., BH3).

[0317] The recombinant expression of large molecules in cell cultures can be a challenging task with numerous limitations (e.g., poor protein expression levels, stalled translation resulting in truncated expression products, protein misfolding, etc.). These limitations can be reduced or avoided by administering the polynucleotides (e.g., a RNA, e.g., a mRNA), which encode a functionally active polypeptide (e.g., BH3) or compositions or formulations comprising the same to a patient suffering from AIP, so the synthesis and delivery of the polypeptide (e.g., BH3) to treat AIP takes place endogenously.

[0318] Changing from an in vitro expression system (e.g., cell culture) to in vivo expression requires the redesign of the nucleic acid sequence encoding the therapeutic agent. Redesigning a naturally occurring gene sequence by choosing different codons without necessarily altering the encoded amino acid sequence can often lead to dramatic increases in protein expression levels (Gustafsson et al., 2004, Trends Biotechnol 22:346-53). Variables such as codon adaptation index (CAI), mRNA secondary structures, cis-regulatory sequences, GC content and many other similar variables have been shown to somewhat correlate with protein expression levels (Villalobos et al., 2006, BMC Bioinformatics 7:285). However, due to the degeneracy of the genetic code, there are numerous different nucleic acid sequences that can all encode the same therapeutic agent. Each amino acid is encoded by up to six synonymous codons; and the choice between these codons influences gene expression. In addition, codon usage (i.e., the frequency with which different organisms use codons for expressing a polypeptide sequence) differs among organisms (for example, recombinant production of human or humanized therapeutic antibodies frequently takes place in hamster cell cultures).

[0319] In some embodiments, a reference nucleic acid sequence can be sequence optimized by applying a codon map. The skilled artisan will appreciate that T bases are present in DNA, whereas the T bases would be replaced by U bases in corresponding RNAs. For example, a sequence optimized nucleic acid disclosed herein in DNA form, e.g., a vector or an in-vitro translation (IVT) template, would have its T bases transcribed as U based in its corresponding transcribed mRNA. In this respect, both sequence optimized DNA sequences (comprising T) and their corresponding RNA sequences (comprising U) are considered sequence optimized nucleic acid of the present invention. A skilled artisan would also understand that equivalent codon-maps can be generated by replaced one or more bases with non-natural bases. Thus, e.g., a TTC codon (DNA map) would correspond to a UUC codon (RNA map), which in turn can correspond to a ΨΨC codon (RNA map in which U has been replaced with pseudouridine).

[0320] In one embodiment, a reference sequence encoding BH3 can be optimized by replacing all the codons encoding a certain amino acid with only one of the alternative codons provided in a codon map. For example, all the valines in the optimized sequence would be encoded by GTG or GTC or GTT.

[0321] Sequence optimized polynucleotides of the invention can be generated using one or more optimization methods, or a combination thereof. Sequence optimization methods which can be used to sequence optimize nucleic acid sequences are described in detail herein. This list of methods is not comprehensive or limiting.

[0322] It will be appreciated that the design principles and rules described for each one of the sequence optimization methods discussed below can be combined in many different ways, for example high G/C content sequence optimization for some regions or uridine content sequence optimization for other regions of the reference nucleic acid sequence, as well as targeted nucleotide mutations to minimize secondary structure throughout the sequence or to eliminate deleterious motifs.

[0323] The choice of potential combinations of sequence optimization methods can be, for example, dependent on the specific chemistry used to produce a synthetic polynucleotide. Such a choice can also depend on characteristics of the protein encoded by the sequence optimized nucleic acid, e.g., a full sequence, a functional fragment, or a fusion protein comprising BH3, etc. In some embodiments, such a choice can depend on the specific tissue or cell targeted by the sequence optimized nucleic acid (e.g., a therapeutic synthetic mRNA).

[0324] The mechanisms of combining the sequence optimization methods or design rules derived from the application and analysis of the optimization methods can be either simple or complex. For example, the combination can be:
[0325] (i) Sequential: Each sequence optimization method or set of design rules applies to a different subsequence of the overall sequence, for example reducing uridine at codon positions 1 to 30 and then selecting high frequency codons for the remainder of the sequence;
[0326] (ii) Hierarchical: Several sequence optimization methods or sets of design rules are combined in a hierarchical, deterministic fashion. For example, use the most GC-rich codons, breaking ties (which are common) by choosing the most frequent of those codons.
[0327] (iii) Multifactorial/Multiparametric: Machine learning or other modeling techniques are used to design a single sequence that best satisfies multiple overlapping and possibly contradictory requirements. This approach would require the use of a computer applying a number of mathematical techniques, for example, genetic algorithms.

[0328] Ultimately, each one of these approaches can result in a specific set of rules which in many cases can be summarized in a single codon table, i.e., a sorted list of codons for each amino acid in the target protein (i.e., BH3), with a specific rule or set of rules indicating how to select a specific codon for each amino acid position.

[0329] a. Uridine Content Optimization

[0330] The presence of local high concentrations of uridine in a nucleic acid sequence can have detrimental effects on translation, e.g., slow or prematurely terminated translation, especially when modified uridine analogs are used in the production of synthetic mRNAs. Furthermore, high uridine content can also reduce the in vivo half-life of synthetic mRNAs due to TLR activation.

[0331] Accordingly, a nucleic acid sequence can be sequence optimized using a method comprising at least one uridine content optimization step. Such a step comprises, e.g., substituting at least one codon in the reference nucleic acid with an alternative codon to generate a uridine-modified sequence, wherein the uridine-modified sequence has at least one of the following properties:
[0332] (i) increase or decrease in global uridine content;
[0333] (ii) increase or decrease in local uridine content (i.e., changes in uridine content are limited to specific subsequences);
[0334] (iii) changes in uridine distribution without altering the global uridine content;
[0335] (iv) changes in uridine clustering (e.g., number of clusters, location of clusters, or distance between clusters); or
[0336] (v) combinations thereof.

[0337] In some embodiments, the sequence optimization process comprises optimizing the global uridine content, i.e., optimizing the percentage of uridine nucleobases in the sequence optimized nucleic acid with respect to the percentage of uridine nucleobases in the reference nucleic acid sequence. For example, 30% of nucleobases can be uridines in the reference sequence and 10% of nucleobases can be uridines in the sequence optimized nucleic acid.

[0338] In other embodiments, the sequence optimization process comprises reducing the local uridine content in specific regions of a reference nucleic acid sequence, i.e., reducing the percentage of uridine nucleobases in a subsequence of the sequence optimized nucleic acid with respect to the percentage of uridine nucleobases in the corresponding subsequence of the reference nucleic acid sequence. For example, the reference nucleic acid sequence can have a 5′-end region (e.g., 30 codons) with a local uridine content of 30%, and the uridine content in that same region could be reduced to 10% in the sequence optimized nucleic acid.

[0339] In specific embodiments, codons can be replaced in the reference nucleic acid sequence to reduce or modify, for example, the number, size, location, or distribution of uridine clusters that could have deleterious effects on protein translation. Although as a general rule it is desirable to reduce the uridine content of the reference nucleic acid sequence, in certain embodiments the uridine content, and in particular the local uridine content, of some subsequences of the reference nucleic acid sequence can be increased.

[0340] The reduction of uridine content to avoid adverse effects on translation can be done in combination with other optimization methods disclosed here to achieve other design goals. For example, uridine content optimization can be combined with ramp design, since using the rarest codons for most amino acids will, with a few exceptions, reduce the U content.

[0341] In some embodiments, the uridine-modified sequence is designed to induce a lower Toll-Like Receptor (TLR) response when compared to the reference nucleic acid sequence. Several TLRs recognize and respond to nucleic acids. Double-stranded (ds)RNA, a frequent viral constituent, has been shown to activate TLR3. See Alexopoulou et al. (2001) Nature, 413:732-738 and Wang et al. (2004) Nat. Med., 10:1366-1373. Single-stranded (ss)RNA activates TLR7. See Diebold et al. (2004) Science 303:1529-1531. RNA oligonucleotides, for example RNA with phosphorothioate internucleotide linkages, are ligands of human TLR8. See Heil et al. (2004) Science 303:1526-1529. DNA containing unmethylated CpG motifs, characteristic of bacterial and viral DNA, activate TLR9. See Hemmi et al. (2000) Nature, 408: 740-745.

[0342] As used herein, the term “TLR response” is defined as the recognition of single-stranded RNA by a TLR7 receptor, and in some embodiments encompasses the degradation of the RNA and/or physiological responses caused by the recognition of the single-stranded RNA by the receptor. Methods to determine and quantitate the binding of an RNA to a TLR7 are known in the art. Similarly, methods to determine whether an RNA has triggered a TLR7-mediated physiological response (e.g., cytokine secretion) are well known in the art. In some embodiments, a TLR response can be mediated by TLR3, TLR8, or TLR9 instead of TLR7.

[0343] Suppression of TLR7-mediated response can be accomplished via nucleoside modification. RNA undergoes over hundred different nucleoside modifications in nature (see the RNA Modification Database, available at mods.rna.albany.edu). Human rRNA, for example, has ten times more pseudouridine (Ψ) and 25 times more 2′-O-methylated nucleosides than bacterial rRNA. Bacterial mRNA contains no nucleoside modifications, whereas mammalian mRNAs have modified nucleosides such as 5-methylcytidine (m5C), N6-methyladenosine (m6A), inosine and many 2′-O-methylated nucleosides in addition to N7-methylguanosine (m7G).

[0344] Uracil and ribose, the two defining features of RNA, are both necessary and sufficient for TLR7 stimulation, and short single-stranded RNA (ssRNA) act as TLR7 agonists in a sequence-independent manner as long as they contain several uridines in close proximity. See Diebold et al. (2006) Eur. J. Immunol. 36:3256-3267, which is herein incorporated by reference in its entirety. Accordingly, one or more of the optimization methods disclosed herein comprises reducing the uridine content (locally and/or globally) and/or reducing or modifying uridine clustering to reduce or to suppress a TLR7-mediated response.

[0345] In some embodiments, the TLR response (e.g., a response mediated by TLR7) caused by the uridine-modified sequence is at least about 10%, at least about 15%, at least about 20%, at least about 25%, at least about 30%, at least about 35%, at least about 40%, at least about 45%, at least about 50%, at least about 55%, at least about 60%, at least about 65%, at least about 70%, at least about 75%, at least about 80%, at least about 85%, at least about 90%, at least about 95%, or at least about 100% lower than the TLR response caused by the reference nucleic acid sequence.

[0346] In some embodiments, the TLR response caused by the reference nucleic acid sequence is at least about 1-fold, at least about 1.1-fold, at least about 1.2-fold, at least about 1.3-fold, at least about 1.4-fold, at least about 1.5-fold, at least about 1.6-fold, at least about 1.7-fold, at least about 1.8-fold, at least about 1.9-fold, at least about 2-fold, at least about 3-fold, at least about 4-fold, at least about 5-fold, at least about 6-fold, at least about 7-fold, at least about 8-fold, at least about 9-fold, or at least about 10-fold higher than the TLR response caused by the uridine-modified sequence.

[0347] In some embodiments, the uridine content (average global uridine content) (absolute or relative) of the uridine-modified sequence is higher than the uridine content (absolute or relative) of the reference nucleic acid sequence. Accordingly, in some embodiments, the uridine-modified sequence contains at least about 5%, at least about 10%, at least about 15%, at least about 20%, at least about 25%, at least about 30%, at least about 35%, at least about 40%, at least about 45%, at least about 50%, at least about 55%, at least about 60%, at least about 65%, at least about 70%, at least about 75%, at least about 80%, at least about 85%, at least about 90%, at least about 95%, or at least about 100% more uridine that the reference nucleic acid sequence.

[0348] In other embodiments, the uridine content (average global uridine content) (absolute or relative) of the uridine-modified sequence is lower than the uridine content (absolute or relative) of the reference nucleic acid sequence. Accordingly, in some embodiments, the uridine-modified sequence contains at least about 5%, at least about 10%, at least about 15%, at least about 20%, at least about 25%, at least about 30%, at least about 35%, at least about 40%, at least about 45%, at least about 50%, at least about 55%, at least about 60%, at least about 65%, at least about 70%, at least about 75%, at least about 80%, at least about 85%, at least about 90%, at least about 95%, or at least about 100% less uridine that the reference nucleic acid sequence.

[0349] In some embodiments, the uridine content (average global uridine content) (absolute or relative) of the uridine-modified sequence is less than 50%, 49%, 48%, 47%, 46%, 45%, 44%, 43%, 42%, 41%, 40%, 39%, 38%, 37%, 36%, 35%, 34%, 33%, 32%, 31%, 30%, 29%, 28%, 27%, 26%, 25%, 24%, 23%, 22%, 21%, 20%, 19%, 18%, 17%, 16%, 15%, 14%, 13%, 12%, 11%, 10%, 9%, 8%, 7%, 6%, 5%, 4%, 3%, 2% or 1% of the total nucleobases in the uridine-modified sequence. In some embodiments, the uridine content of the uridine-modified sequence is between about 10% and about 20%. In some particular embodiments, the uridine content of the uridine-modified sequence is between about 12% and about 16%.

[0350] In some embodiments, the uridine content of the reference nucleic acid sequence can be measured using a sliding window. In some embodiments, the length of the sliding window is 5, 6, 7, 8, 9, 10, 11, 12, 13, 14, 15, 16, 17, 18, 19, 20, 21, 22, 23, 24, 25, 26, 27, 28, 29, 30, 31, 32, 33, 34, 35, 36, 37, 38, 39, or 40 nucleobases. In some embodiments, the sliding window is over 40 nucleobases in length. In some embodiments, the sliding window is 20 nucleobases in length. Based on the uridine content measured with a sliding window, it is possible to generate a histogram representing the uridine content throughout the length of the reference nucleic acid sequence and sequence optimized nucleic acids.

[0351] In some embodiments, a reference nucleic acid sequence can be modified to reduce or eliminate peaks in the histogram that are above or below a certain percentage value. In some embodiments, the reference nucleic acid sequence can be modified to eliminate peaks in the sliding-window representation which are above 65%, 60%, 55%, 50%, 45%, 40%, 35%, or 30% uridine. In another embodiment, the reference nucleic acid sequence can be modified so no peaks are over 30% uridine in the sequence optimized nucleic acid, as measured using a 20 nucleobase sliding window. In some embodiments, the reference nucleic acid sequence can be modified so no more or no less than a predetermined number of peaks in the sequence optimized nucleic sequence, as measured using a 20 nucleobase sliding window, are above or below a certain threshold value. For example, in some embodiments, the reference nucleic acid sequence can be modified so no peaks or no more than 1, 2, 3, 4, 5, 6, 7, 8, 9 or 10 peaks in the sequence optimized nucleic acid are above 10%, 15%, 20%, 25% or 30% uridine. In another embodiment, the sequence optimized nucleic acid contains between 0 peaks and 2 peaks with uridine contents 30% of higher.

[0352] In some embodiments, a reference nucleic acid sequence can be sequence optimized to reduce the incidence of consecutive uridines. For example, two consecutive leucines could be encoded by the sequence CUUUUG, which would include a four uridine cluster. Such subsequence could be substituted with CUGCUC, which would effectively remove the uridine cluster. Accordingly, a reference nucleic sequence can be sequence optimized by reducing or eliminating uridine pairs (UU), uridine triplets (UUU) or uridine quadruplets (UUUU). Higher order combinations of U are not considered combinations of lower order combinations. Thus, for example, UUUU is strictly considered a quadruplet, not two consecutive U pairs; or UUUUUU is considered a sextuplet, not three consecutive U pairs, or two consecutive U triplets, etc.

[0353] In some embodiments, all uridine pairs (UU) and/or uridine triplets (UUU) and/or uridine quadruplets (UUUU) can be removed from the reference nucleic acid sequence. In other embodiments, uridine pairs (UU) and/or uridine triplets (UUU) and/or uridine quadruplets (UUUU) can be reduced below a certain threshold, e.g., no more than 1, 2, 3, 4, 5, 6, 7, 8, 9, 10, 11, 12, 13, 14, 15, 16, 17, 18, 19, or 20 occurrences in the sequence optimized nucleic acid. In a particular embodiment, the sequence optimized nucleic acid contains less than 20, 19, 18, 17, 16, 15, 14, 13, 12, 11, 10, 9, 8, 7, 6, 5, 4, 3, 2, or 1 uridine pairs. In another particular embodiment, the sequence optimized nucleic acid contains no uridine pairs and/or triplets.

[0354] Phenylalanine codons, i.e., UUC or UUU, comprise a uridine pair or triplet and therefore sequence optimization to reduce uridine content can at most reduce the phenylalanine U triplet to a phenylalanine U pair. In some embodiments, the occurrence of uridine pairs (UU) and/or uridine triplets (UUU) refers only to non-phenylalanine U pairs or triplets. Accordingly, in some embodiments, non-phenylalanine uridine pairs (UU) and/or uridine triplets (UUU) can be reduced below a certain threshold, e.g., no more than 1, 2, 3, 4, 5, 6, 7, 8, 9, 10, 11, 12, 13, 14, 15, 16, 17, 18, 19, or 20 occurrences in the sequence optimized nucleic acid. In a particular embodiment, the sequence optimized nucleic acid contains less than 20, 19, 18, 17, 16, 15, 14, 13, 12, 11, 10, 9, 8, 7, 6, 5, 4, 3, 2, or 1 non-phenylalanine uridine pairs and/or triplets. In another particular embodiment, the sequence optimized nucleic acid contains no non-phenylalanine uridine pairs and/or triplets.

[0355] In some embodiments, the reduction in uridine combinations (e.g., pairs, triplets, quadruplets) in the sequence optimized nucleic acid can be expressed as a percentage reduction with respect to the uridine combinations present in the reference nucleic acid sequence.

[0356] In some embodiments, a sequence optimized nucleic acid can contain about 1%, 2%, 3%, 4%, 5%, 6%, 7%, 8%, 9%, 10%, 11%, 12%, 13%, 14%, 15%, 16%, 17%, 18%, 19%, 20%, 25%, 30%, 35%, 40%, 45%, 50%, 55%, 60%, or 65% of the total number of uridine pairs present in the reference nucleic acid sequence. In some embodiments, a sequence optimized nucleic acid can contain about 1%, 2%, 3%, 4%, 5%, 6%, 7%, 8%, 9%, 10%, 11%, 12%, 13%, 14%, 15%, 16%, 17%, 18%, 19%, 20%, 25%, 30%, 35%, 40%, 45%, 50%, 55%, 60%, or 65% of the total number of uridine triplets present in the reference nucleic acid sequence. In some embodiments, a sequence optimized nucleic acid can contain about 1%, 2%, 3%, 4%, 5%, 6%, 7%, 8%, 9%, 10%, 11%, 12%, 13%, 14%, 15%, 16%, 17%, 18%, 19%, 20%, 25%, 30%, 35%, 40%, 45%, 50%, 55%, 60%, or 65% of the total number of uridine quadruplets present in the reference nucleic acid sequence.

[0357] In some embodiments, a sequence optimized nucleic acid can contain about 1%, 2%, 3%, 4%, 5%, 6%, 7%, 8%, 9%, 10%, 11%, 12%, 13%, 14%, 15%, 16%, 17%, 18%, 19%, 20%, 25%, 30%, 35%, 40%, 45%, 50%, 55%, 60%, or 65% of the total number of non-phenylalanine uridine pairs present in the reference nucleic acid sequence. In some embodiments, a sequence optimized nucleic acid can contain about 1%, 2%, 3%, 4%, 5%, 6%, 7%, 8%, 9%, 10%, 11%, 12%, 13%, 14%, 15%, 16%, 17%, 18%, 19%, 20%, 25%, 30%, 35%, 40%, 45%, 50%, 55%, 60%, or 65% of the total number of non-phenylalanine uridine triplets present in the reference nucleic acid sequence.

[0358] In some embodiments, the uridine content in the sequence optimized sequence can be expressed with respect to the theoretical minimum uridine content in the sequence. The term “theoretical minimum uridine content” is defined as the uridine content of a nucleic acid sequence as a percentage of the sequence's length after all the codons in the sequence have been replaced with synonymous codon with the lowest uridine content. In some embodiments, the uridine content of the sequence optimized nucleic acid is identical to the theoretical minimum uridine content of the reference sequence (e.g., a wild type sequence). In some aspects, the uridine content of the sequence optimized nucleic acid is about 100%, about 105%, about 110%, about 115%, about 120%, about 125%, about 130%, about 135%, about 140%, about 145%, about 150%, about 155%, about 160%, about 165%, about 170%, about 175%, about 180%, about 185%, about 190%, about 195%, about 200%, about 210%, about 220%, about 230%, about 240% or about 250% of the theoretical minimum uridine content of the reference sequence (e.g., a wild type sequence).

[0359] In some embodiments, the uridine content of the sequence optimized nucleic acid is identical to the theoretical minimum uridine content of the reference sequence (e.g., a wild type sequence). The reference nucleic acid sequence (e.g., a wild type sequence) can comprise uridine clusters which due to their number, size, location, distribution or combinations thereof have negative effects on translation. As used herein, the term “uridine cluster” refers to a subsequence in a reference nucleic acid sequence or sequence optimized nucleic sequence with contains a uridine content (usually described as a percentage) which is above a certain threshold. Thus, in certain embodiments, if a subsequence comprises more than about 10%, 15%, 20%, 25%, 30%, 35%, 40%, 45%, 50%, 55%, 60% or 65% uridine content, such subsequence would be considered a uridine cluster.

[0360] The negative effects of uridine clusters can be, for example, eliciting a TLR7 response. Thus, in some implementations of the nucleic acid sequence optimization methods disclosed herein it is desirable to reduce the number of clusters, size of clusters, location of clusters (e.g., close to the 5′ and/or 3′ end of a nucleic acid sequence), distance between clusters, or distribution of uridine clusters (e.g., a certain pattern of cluster along a nucleic acid sequence, distribution of clusters with respect to secondary structure elements in the expressed product, or distribution of clusters with respect to the secondary structure of an mRNA).

[0361] In some embodiments, the reference nucleic acid sequence comprises at least one uridine cluster, wherein said uridine cluster is a subsequence of the reference nucleic acid sequence wherein the percentage of total uridine nucleobases in said subsequence is above a predetermined threshold. In some embodiments, the length of the subsequence is at least about 10, at least about 15, at least about 20, at least about 25, at least about 30, at least about 35, at least about 40, at least about 45, at least about 50, at least about 55, at least about 60, at least about 65, at least about 70, at least about 75, at least about 80, at least about 85, at least about 90, at least about 95, or at least about 100 nucleobases. In some embodiments, the subsequence is longer than 100 nucleobases. In some embodiments, the threshold is 1%, 2%, 3%, 4%, 5%, 6%, 7%, 8%, 9%, 10%, 11%, 12%, 13%, 14%, 15%, 16%, 17%, 18%, 19%, 20%, 21%, 22%, 23%, 24% or 25% uridine content. In some embodiments, the threshold is above 25%.

[0362] For example, an amino acid sequence comprising A, D, G, S and R could be encoded by the nucleic acid sequence GCU, GAU, GGU, AGU, CGU. Although such sequence does not contain any uridine pairs, triplets, or quadruplets, one third of the nucleobases would be uridines. Such a uridine cluster could be removed by using alternative codons, for example, by using GCC, GAC, GGC, AGC, and CGC, which would contain no uridines.

[0363] In other embodiments, the reference nucleic acid sequence comprises at least one uridine cluster, wherein said uridine cluster is a subsequence of the reference nucleic acid sequence wherein the percentage of uridine nucleobases of said subsequence as measured using a sliding window that is above a predetermined threshold. In some embodiments, the length of the sliding window is 5, 6, 7, 8, 9, 10, 11, 12, 13, 14, 15, 16, 17, 18, 19, 20, 21, 22, 23, 24, 25, 26, 27, 28, 29, 30, 31, 32, 33, 34, 35, 36, 37, 38, 39, or 40 nucleobases. In some embodiments, the sliding window is over 40 nucleobases in length. In some embodiments, the threshold is 1%, 2%, 3%, 4%, 5%, 6%, 7%, 8%, 9%, 10%, 11%, 12%, 13%, 14%, 15%, 16%, 17%, 18%, 19%, 20%, 21%, 22%, 23%, 24% or 25% uridine content. In some embodiments, the threshold is above 25%.

[0364] In some embodiments, the reference nucleic acid sequence comprises at least two uridine clusters. In some embodiments, the uridine-modified sequence contains fewer uridine-rich clusters than the reference nucleic acid sequence. In some embodiments, the uridine-modified sequence contains more uridine-rich clusters than the reference nucleic acid sequence. In some embodiments, the uridine-modified sequence contains uridine-rich clusters with are shorter in length than corresponding uridine-rich clusters in the reference nucleic acid sequence. In other embodiments, the uridine-modified sequence contains uridine-rich clusters which are longer in length than the corresponding uridine-rich cluster in the reference nucleic acid sequence. See, Kariko et al. (2005) Immunity 23:165-175; Kormann et al. (2010) Nature Biotechnology 29:154-157; or Sahin et al. (2014) Nature Reviews Drug Discovery I AOP, published online 19 Sep. 2014m doi:10.1038/nrd4278; all of which are herein incorporated by reference their entireties.

[0365] b. Guanine/Cytosine (G/C) Content

[0366] A reference nucleic acid sequence can be sequence optimized using methods comprising altering the Guanine/Cytosine (G/C) content (absolute or relative) of the reference nucleic acid sequence. Such optimization can comprise altering (e.g., increasing or decreasing) the global G/C content (absolute or relative) of the reference nucleic acid sequence; introducing local changes in G/C content in the reference nucleic acid sequence (e.g., increase or decrease G/C in selected regions or subsequences in the reference nucleic acid sequence); altering the frequency, size, and distribution of G/C clusters in the reference nucleic acid sequence, or combinations thereof.

[0367] In some embodiments, the sequence optimized nucleic acid encoding a polypeptide (e.g., BH3) comprises an overall increase in G/C content (absolute or relative) relative to the G/C content (absolute or relative) of the reference nucleic acid sequence. In some embodiments, the overall increase in G/C content (absolute or relative) is at least about 5%, at least about 10%, at least about 15%, at least about 20%, at least about 25%, at least about 30%, at least about 35%, at least about 40%, at least about 45%, at least about 50%, at least about 55%, at least about 60%, at least about 65%, at least about 70%, at least about 75%, at least about 80%, at least about 85%, at least about 90%, at least about 95%, or at least about 100% relative to the G/C content (absolute or relative) of the reference nucleic acid sequence.

[0368] In some embodiments, the sequence optimized nucleic acid encoding a polypeptide (e.g., BH3) comprises an overall decrease in G/C content (absolute or relative) relative to the G/C content of the reference nucleic acid sequence. In some embodiments, the overall decrease in G/C content (absolute or relative) is at least about 5%, at least about 10%, at least about 15%, at least about 20%, at least about 25%, at least about 30%, at least about 35%, at least about 40%, at least about 45%, at least about 50%, at least about 55%, at least about 60%, at least about 65%, at least about 70%, at least about 75%, at least about 80%, at least about 85%, at least about 90%, at least about 95%, or at least about 100% relative to the G/C content (absolute or relative) of the reference nucleic acid sequence.

[0369] In some embodiments, the sequence optimized nucleic acid encoding a polypeptide (e.g., BH3) comprises a local increase in Guanine/Cytosine (G/C) content (absolute or relative) in a subsequence (i.e., a G/C modified subsequence) relative to the G/C content (absolute or relative) of the corresponding subsequence in the reference nucleic acid sequence. In some embodiments, the local increase in G/C content (absolute or relative) is by at least about 5%, at least about 10%, at least about 15%, at least about 20%, at least about 25%, at least about 30%, at least about 35%, at least about 40%, at least about 45%, at least about 50%, at least about 55%, at least about 60%, at least about 65%, at least about 70%, at least about 75%, at least about 80%, at least about 85%, at least about 90%, at least about 95%, or at least about 100% relative to the G/C content (absolute or relative) of the corresponding subsequence in the reference nucleic acid sequence.

[0370] In some embodiments, the sequence optimized nucleic acid encoding a polypeptide (e.g., BH3) comprises a local decrease in Guanine/Cytosine (G/C) content (absolute or relative) in a subsequence (i.e., a G/C modified subsequence) relative to the G/C content (absolute or relative) of the corresponding subsequence in the reference nucleic acid sequence. In some embodiments, the local decrease in G/C content (absolute or relative) is by at least about 5%, at least about 10%, at least about 15%, at least about 20%, at least about 25%, at least about 30%, at least about 35%, at least about 40%, at least about 45%, at least about 50%, at least about 55%, at least about 60%, at least about 65%, at least about 70%, at least about 75%, at least about 80%, at least about 85%, at least about 90%, at least about 95%, or at least about 100% relative to the G/C content (absolute or relative) of the corresponding subsequence in the reference nucleic acid sequence.

[0371] In some embodiments, the G/C content (absolute or relative) is increased or decreased in a subsequence which is at least about 5, 10, 15, 20, 25, 30, 35, 40, 45, 50, 55, 60, 65, 70, 75, 80, 85, 90, 95, or 100 nucleobases in length.

[0372] In some embodiments, the G/C content (absolute or relative) is increased or decreased in a subsequence which is at least about 100, 110, 120, 130, 140, 150, 160, 170, 180, 190, 200, 210, 220, 230, 240, 250, 260, 270, 280, 290, 300, 310, 320, 330, 340, 350, 360, 370, 380, 390, 400, 410, 420, 430, 440, 450, 460, 470, 480, 490, 500, 510, 520, 530, 540, 550, 560, 570, 580, 590, 600, 610, 620, 630, 640, 650, 660, 670, 680, 690, 700, 710, 720, 730, 740, 750, 760, 770, 780, 790, 800, 810, 820, 830, 840, 850, 860, 870, 880, 890, 900, 910, 920, 930, 940, 950, 960, 970, 980, 990, or 1000 nucleobases in length.

[0373] In some embodiments, the G/C content (absolute or relative) is increased or decreased in a subsequence which is at least about 1100, 1200, 1300, 1400, 1500, 1600, 1700, 1800, 1900, 2000, 2100, 2200, 2300, 2400, 2500, 2600, 2700, 2800, 2900, 3000, 3100, 3200, 3300, 3400, 3500, 3600, 3700, 3800, 3900, 4000, 4100, 4200, 4300, 4400, 4500, 4600, 4700, 4800, 4900, 5000, 5100, 5200, 5300, 5400, 5500, 5600, 5700, 5800, 5900, 6000, 6100, 6200, 6300, 6400, 6500, 6600, 6700, 6800, 6900, 7000, 7100, 7200, 7300, 7400, 7500, 7600, 7700, 7800, 7900, 8000, 8100, 8200, 8300, 8400, 8500, 8600, 8700, 8800, 8900, 9000, 9100, 9200, 9300, 9400, 9500, 9600, 9700, 9800, 9900, or 10000 nucleobases in length.

[0374] The increases or decreases in G and C content (absolute or relative) described herein can be conducted by replacing synonymous codons with low G/C content with synonymous codons having higher G/C content, or vice versa. For example, L has 6 synonymous codons: two of them have 2 G/C (CUC, CUG), 3 have a single G/C (UUG, CUU, CUA), and one has no G/C (UUA). So if the reference nucleic acid had a CUC codon in a certain position, G/C content at that position could be reduced by replacing CUC with any of the codons having a single G/C or the codon with no G/C. See, U.S. Publ. Nos. US20140228558, US20050032730 A1; Gustafsson et al. (2012) Protein Expression and Purification 83: 37-46; all of which are incorporated herein by reference in their entireties.

[0375] c. Codon Frequency—Codon Usage Bias

[0376] Numerous codon optimization methods known in the art are based on the substitution of codons in a reference nucleic acid sequence with codons having higher frequencies. Thus, in some embodiments, a nucleic acid sequence encoding a polypeptide (e.g., BH3) disclosed herein can be sequence optimized using methods comprising the use of modifications in the frequency of use of one or more codons relative to other synonymous codons in the sequence optimized nucleic acid with respect to the frequency of use in the non-codon optimized sequence.

[0377] As used herein, the term “codon frequency” refers to codon usage bias, i.e., the differences in the frequency of occurrence of synonymous codons in coding DNA/RNA. It is generally acknowledged that codon preferences reflect a balance between mutational biases and natural selection for translational optimization. Optimal codons help to achieve faster translation rates and high accuracy. As a result of these factors, translational selection is expected to be stronger in highly expressed genes. In the field of bioinformatics and computational biology, many statistical methods have been proposed and used to analyze codon usage bias. See, e.g., Comeron & Aguadé (1998) J. Mol. Evol. 47: 268-74. Methods such as the “frequency of optimal codons” (Fop) (Ikemura (1981) J. Mol. Biol. 151 (3): 389-409), the “Relative Codon Adaptation” (RCA) (Fox & Eril (2010) DNA Res. 17 (3): 185-96) or the “Codon Adaptation Index” (CAI) (Sharp & Li (1987) Nucleic Acids Res. 15 (3): 1281-95) are used to predict gene expression levels, while methods such as the “effective number of codons” (Nc) and Shannon entropy from information theory are used to measure codon usage evenness. Multivariate statistical methods, such as correspondence analysis and principal component analysis, are widely used to analyze variations in codon usage among genes (Suzuki et al. (2008) DNA Res. 15 (6): 357-65; Sandhu et al., In Silico Biol. 2008; 8(2):187-92).

[0378] The nucleic acid sequence encoding a polypeptide disclosed herein (e.g., a wild type nucleic acid sequence, a mutant nucleic acid sequence, a chimeric nucleic sequence, etc. which can be, for example, an mRNA), can be codon optimized using methods comprising substituting at least one codon in the reference nucleic acid sequence with an alternative codon having a higher or lower codon frequency in the synonymous codon set; wherein the resulting sequence optimized nucleic acid has at least one optimized property with respect to the reference nucleic acid sequence.

[0379] In some embodiments, at least about 5%, at least about 10%, at least about 15%, at least about 20%, at least about 25%, at least about 30%, at least about 35%, at least about 40%, at least about 45%, at least about 50%, at least about 55%, at least about 60%, at least about 65%, at least about 70%, at least about 75%, at least about 80%, at least about 85%, at least about 90%, at least about 95%, at least about 99%, or 100% of the codons in the reference nucleic acid sequence encoding a polypeptide (e.g., BH3) are substituted with alternative codons, each alternative codon having a codon frequency higher than the codon frequency of the substituted codon in the synonymous codon set.

[0380] In some embodiments, at least one codon in the reference nucleic acid sequence encoding a polypeptide (e.g., BH3) is substituted with an alternative codon having a codon frequency higher than the codon frequency of the substituted codon in the synonymous codon set, and at least one codon in the reference nucleic acid sequence is substituted with an alternative codon having a codon frequency lower than the codon frequency of the substituted codon in the synonymous codon set.

[0381] In some embodiments, at least about 5%, at least about 10%, at least about 15%, at least about 20%, at least about 25%, at least about 30%, at least about 35%, at least about 40%, at least about 45%, at least about 50%, at least about 55%, at least about 60%, at least about 65%, at least about 70%, or at least about 75% of the codons in the reference nucleic acid sequence encoding a polypeptide (e.g., BH3) are substituted with alternative codons, each alternative codon having a codon frequency higher than the codon frequency of the substituted codon in the synonymous codon set.

[0382] In some embodiments, at least one alternative codon having a higher codon frequency has the highest codon frequency in the synonymous codon set. In other embodiments, all alternative codons having a higher codon frequency have the highest codon frequency in the synonymous codon set.

[0383] In some embodiments, at least one alternative codon having a lower codon frequency has the lowest codon frequency in the synonymous codon set. In some embodiments, all alternative codons having a higher codon frequency have the highest codon frequency in the synonymous codon set.

[0384] In some specific embodiments, at least one alternative codon has the second highest, the third highest, the fourth highest, the fifth highest or the sixth highest frequency in the synonymous codon set. In some specific embodiments, at least one alternative codon has the second lowest, the third lowest, the fourth lowest, the fifth lowest, or the sixth lowest frequency in the synonymous codon set.

[0385] Optimization based on codon frequency can be applied globally, as described above, or locally to the reference nucleic acid sequence encoding a polypeptide (e.g., BH3). In some embodiments, when applied locally, regions of the reference nucleic acid sequence can modified based on codon frequency, substituting all or a certain percentage of codons in a certain subsequence with codons that have higher or lower frequencies in their respective synonymous codon sets. Thus, in some embodiments, at least about 5%, at least about 10%, at least about 15%, at least about 20%, at least about 25%, at least about 30%, at least about 35%, at least about 40%, at least about 45%, at least about 50%, at least about 55%, at least about 60%, at least about 65%, at least about 70%, at least about 75%, at least about 80%, at least about 85%, at least about 90%, at least about 95%, at least about 99%, or 100% of the codons in a subsequence of the reference nucleic acid sequence are substituted with alternative codons, each alternative codon having a codon frequency higher than the codon frequency of the substituted codon in the synonymous codon set.

[0386] In some embodiments, at least one codon in a subsequence of the reference nucleic acid sequence encoding a polypeptide (e.g., BH3) is substituted with an alternative codon having a codon frequency higher than the codon frequency of the substituted codon in the synonymous codon set, and at least one codon in a subsequence of the reference nucleic acid sequence is substituted with an alternative codon having a codon frequency lower than the codon frequency of the substituted codon in the synonymous codon set.

[0387] In some embodiments, at least about 5%, at least about 10%, at least about 15%, at least about 20%, at least about 25%, at least about 30%, at least about 35%, at least about 40%, at least about 45%, at least about 50%, at least about 55%, at least about 60%, at least about 65%, at least about 70%, or at least about 75% of the codons in a subsequence of the reference nucleic acid sequence encoding a polypeptide (e.g., BH3) are substituted with alternative codons, each alternative codon having a codon frequency higher than the codon frequency of the substituted codon in the synonymous codon set.

[0388] In some embodiments, at least one alternative codon substituted in a subsequence of the reference nucleic acid sequence encoding a polypeptide (e.g., BH3) and having a higher codon frequency has the highest codon frequency in the synonymous codon set. In other embodiments, all alternative codons substituted in a subsequence of the reference nucleic acid sequence and having a lower codon frequency have the lowest codon frequency in the synonymous codon set.

[0389] In some embodiments, at least one alternative codon substituted in a subsequence of the reference nucleic acid sequence encoding a polypeptide (e.g., BH3) and having a lower codon frequency has the lowest codon frequency in the synonymous codon set. In some embodiments, all alternative codons substituted in a subsequence of the reference nucleic acid sequence and having a higher codon frequency have the highest codon frequency in the synonymous codon set.

[0390] In specific embodiments, a sequence optimized nucleic acid encoding a polypeptide (e.g., BH3) can comprise a subsequence having an overall codon frequency higher or lower than the overall codon frequency in the corresponding subsequence of the reference nucleic acid sequence at a specific location, for example, at the 5′ end or 3′ end of the sequence optimized nucleic acid, or within a predetermined distance from those region (e.g., at least 1, 2, 3, 4, 5, 6, 7, 8, 9, 10, 15, 20, 25, 30, 35, 40, 45, 50, 55, 60, 65, 70, 75, 80, 85, 90, 95 or 100 codons from the 5′ end or 3′ end of the sequence optimized nucleic acid).

[0391] In some embodiments, a sequence optimized nucleic acid encoding a polypeptide (e.g., BH3) can comprise more than one subsequence having an overall codon frequency higher or lower than the overall codon frequency in the corresponding subsequence of the reference nucleic acid sequence. A skilled artisan would understand that subsequences with overall higher or lower overall codon frequencies can be organized in innumerable patterns, depending on whether the overall codon frequency is higher or lower, the length of the subsequence, the distance between subsequences, the location of the subsequences, etc. See, U.S. Pat. Nos. 5,082,767, 8,126,653, 7,561,973, 8,401,798; U.S. Publ. No. US 20080046192, US 20080076161; Int'l. Publ. No. WO2000018778; Welch et al. (2009) PLoS ONE 4(9): e7002; Gustafsson et al. (2012) Protein Expression and Purification 83: 37-46; Chung et al. (2012) BMC Systems Biology 6:134; all of which are incorporated herein by reference in their entireties.

[0392] d. Destabilizing Motif Substitution

[0393] There is a variety of motifs that can affect sequence optimization, which fall into various non-exclusive categories, for example:
[0394] (i) Primary sequence based motifs: Motifs defined by a simple arrangement of nucleotides.
[0395] (ii) Structural motifs: Motifs encoded by an arrangement of nucleotides that tends to form a certain secondary structure.
[0396] (iii) Local motifs: Motifs encoded in one contiguous subsequence.
[0397] (iv) Distributed motifs: Motifs encoded in two or more disjoint subsequences.
[0398] (v) Advantageous motifs: Motifs which improve nucleotide structure or function.
[0399] (vi) Disadvantageous motifs: Motifs with detrimental effects on nucleotide structure or function.

[0400] There are many motifs that fit into the category of disadvantageous motifs. Some examples include, for example, restriction enzyme motifs, which tend to be relatively short, exact sequences such as the restriction site motifs for Xba1 (TCTAGA), EcoRI (GAATTC), EcoRII (CCWGG, wherein W means A or T, per the IUPAC ambiguity codes), or HindIII(AAGCTT); enzyme sites, which tend to be longer and based on consensus not exact sequence, such in the T7 RNA polymerase (GnnnnWnCRnCTCnCnnWnD, wherein n means any nucleotide, R means A or G, W means A or T, D means A or G or T but not C); structural motifs, such as GGGG repeats (Kim et al. (1991) Nature 351(6324):331-2); or other motifs such as CUG-triplet repeats (Querido et al. (2014) J. Cell Sci. 124:1703-1714).

[0401] Accordingly, the nucleic acid sequence encoding a polypeptide (e.g., BH3) disclosed herein can be sequence optimized using methods comprising substituting at least one destabilizing motif in a reference nucleic acid sequence, and removing such disadvantageous motif or replacing it with an advantageous motif.

[0402] In some embodiments, the optimization process comprises identifying advantageous and/or disadvantageous motifs in the reference nucleic sequence, wherein such motifs are, e.g., specific subsequences that can cause a loss of stability in the reference nucleic acid sequence prior or during the optimization process. For example, substitution of specific bases during optimization can generate a subsequence (motif) recognized by a restriction enzyme. Accordingly, during the optimization process the appearance of disadvantageous motifs can be monitored by comparing the sequence optimized sequence with a library of motifs known to be disadvantageous. Then, the identification of disadvantageous motifs could be used as a post-hoc filter, i.e., to determine whether a certain modification which potentially could be introduced in the reference nucleic acid sequence should be actually implemented or not.

[0403] In some embodiments, the identification of disadvantageous motifs can be used prior to the application of the sequence optimization methods disclosed herein, i.e., the identification of motifs in the reference nucleic acid sequence encoding a polypeptide (e.g., BH3) and their replacement with alternative nucleic acid sequences can be used as a preprocessing step, for example, before uridine reduction.

[0404] In other embodiments, the identification of disadvantageous motifs and their removal is used as an additional sequence optimization technique integrated in a multiparametric nucleic acid optimization method comprising two or more of the sequence optimization methods disclosed herein. When used in this fashion, a disadvantageous motif identified during the optimization process would be removed, for example, by substituting the lowest possible number of nucleobases in order to preserve as closely as possible the original design principle(s) (e.g., low U, high frequency, etc.). See, e.g., U.S. Publ. Nos. US20140228558, US20050032730, or US20140228558, which are herein incorporated by reference in their entireties.

[0405] e. Limited Codon Set Optimization

[0406] In some particular embodiments, sequence optimization of a reference nucleic acid sequence encoding a polypeptide (e.g., BH3) can be conducted using a limited codon set, e.g., a codon set wherein less than the native number of codons is used to encode the 20 natural amino acids, a subset of the 20 natural amino acids, or an expanded set of amino acids including, for example, non-natural amino acids.

[0407] The genetic code is highly similar among all organisms and can be expressed in a simple table with 64 entries which would encode the 20 standard amino acids involved in protein translation plus start and stop codons. The genetic code is degenerate, i.e., in general, more than one codon specifies each amino acid. For example, the amino acid leucine is specified by the UUA, UUG, CUU, CUC, CUA, or CUG codons, while the amino acid serine is specified by UCA, UCG, UCC, UCU, AGU, or AGC codons (difference in the first, second, or third position). Native genetic codes comprise 62 codons encoding naturally occurring amino acids. Thus, in some embodiments of the methods disclosed herein optimized codon sets (genetic codes) comprising less than 62 codons to encode 20 amino acids can comprise 61, 60, 59, 58, 57, 56, 55, 54, 53, 52, 51, 50, 49, 48, 47, 46, 45, 44, 43, 42, 41, 40, 39, 38, 37, 36, 35, 34, 33, 32, 31, 30, 30, 29, 28, 27, 26, 25, 24, 23, 22, 21, or 20 codons.

[0408] In some embodiments, the limited codon set comprises less than 20 codons. For example, if a protein contains less than 20 types of amino acids, such protein could be encoded by a codon set with less than 20 codons. Accordingly, in some embodiments, an optimized codon set comprises as many codons as different types of amino acids are present in the protein encoded by the reference nucleic acid sequence. In some embodiments, the optimized codon set comprises 19, 18, 17, 16, 15, 14, 13, 12, 11, 10, 9, 8, 7, 6, 5, 4, 3, 2 or even 1 codon.

[0409] In some embodiments, at least one amino acid selected from the group consisting of Ala, Arg, Asn, Asp, Cys, Gln, Glu, Gly, His, Ile, Leu, Lys, Phe, Pro, Ser, Thr, Tyr, and Val, i.e., amino acids which are naturally encoded by more than one codon, is encoded with less codons than the naturally occurring number of synonymous codons. For example, in some embodiments, Ala can be encoded in the sequence optimized nucleic acid by 3, 2 or 1 codons; Cys can be encoded in the sequence optimized nucleic acid by 1 codon; Asp can be encoded in the sequence optimized nucleic acid by 1 codon; Glu can be encoded in the sequence optimized nucleic acid by 1 codon; Phe can be encoded in the sequence optimized nucleic acid by 1 codon; Gly can be encoded in the sequence optimized nucleic acid by 3 codons, 2 codons or 1 codon; His can be encoded in the sequence optimized nucleic acid by 1 codon; Ile can be encoded in the sequence optimized nucleic acid by 2 codons or 1 codon; Lys can be encoded in the sequence optimized nucleic acid by 1 codon; Leu can be encoded in the sequence optimized nucleic acid by 5 codons, 4 codons, 3 codons, 2 codons or 1 codon; Asn can be encoded in the sequence optimized nucleic acid by 1 codon; Pro can be encoded in the sequence optimized nucleic acid by 3 codons, 2 codons, or 1 codon; Gln can be encoded in the sequence optimized nucleic acid by 1 codon; Arg can be encoded in the sequence optimized nucleic acid by 5 codons, 4 codons, 3 codons, 2 codons, or 1 codon; Ser can be encoded in the sequence optimized nucleic acid by 5 codons, 4 codons, 3 codons, 2 codons, or 1 codon; Thr can be encoded in the sequence optimized nucleic acid by 3 codons, 2 codons, or 1 codon; Val can be encoded in the sequence optimized nucleic acid by 3 codons, 2 codons, or 1 codon; and, Tyr can be encoded in the sequence optimized nucleic acid by 1 codon.

[0410] In some embodiments, at least one amino acid selected from the group consisting of Ala, Arg, Asn, Asp, Cys, Gln, Glu, Gly, His, Ile, Leu, Lys, Phe, Pro, Ser, Thr, Tyr, and Val, i.e., amino acids which are naturally encoded by more than one codon, is encoded by a single codon in the limited codon set.

[0411] In some specific embodiments, the sequence optimized nucleic acid is a DNA and the limited codon set consists of 20 codons, wherein each codon encodes one of 20 amino acids. In some embodiments, the sequence optimized nucleic acid is a DNA and the limited codon set comprises at least one codon selected from the group consisting of GCT, GCC, GCA, and GCG; at least a codon selected from the group consisting of CGT, CGC, CGA, CGG, AGA, and AGG; at least a codon selected from AAT or ACC; at least a codon selected from GAT or GAC; at least a codon selected from TGT or TGC; at least a codon selected from CAA or CAG; at least a codon selected from GAA or GAG; at least a codon selected from the group consisting of GGT, GGC, GGA, and GGG; at least a codon selected from CAT or CAC; at least a codon selected from the group consisting of ATT, ATC, and ATA; at least a codon selected from the group consisting of TTA, TTG, CTT, CTC, CTA, and CTG; at least a codon selected from AAA or AAG; an ATG codon; at least a codon selected from TTT or TTC; at least a codon selected from the group consisting of CCT, CCC, CCA, and CCG; at least a codon selected from the group consisting of TCT, TCC, TCA, TCG, AGT, and AGC; at least a codon selected from the group consisting of ACT, ACC, ACA, and ACG; a TGG codon; at least a codon selected from TAT or TAC; and, at least a codon selected from the group consisting of GTT, GTC, GTA, and GTG.

[0412] In other embodiments, the sequence optimized nucleic acid is an RNA (e.g., an mRNA) and the limited codon set consists of 20 codons, wherein each codon encodes one of 20 amino acids. In some embodiments, the sequence optimized nucleic acid is an RNA and the limited codon set comprises at least one codon selected from the group consisting of GCU, GCC, GCA, and GCG; at least a codon selected from the group consisting of CGU, CGC, CGA, CGG, AGA, and AGG; at least a codon selected from AAU or ACC; at least a codon selected from GAU or GAC; at least a codon selected from UGU or UGC; at least a codon selected from CAA or CAG; at least a codon selected from GAA or GAG; at least a codon selected from the group consisting of GGU, GGC, GGA, and GGG; at least a codon selected from CAU or CAC; at least a codon selected from the group consisting of AUU, AUC, and AUA; at least a codon selected from the group consisting of UUA, UUG, CUU, CUC, CUA, and CUG; at least a codon selected from AAA or AAG; an AUG codon; at least a codon selected from UUU or UUC; at least a codon selected from the group consisting of CCU, CCC, CCA, and CCG; at least a codon selected from the group consisting of UCU, UCC, UCA, UCG, AGU, and AGC; at least a codon selected from the group consisting of ACU, ACC, ACA, and ACG; a UGG codon; at least a codon selected from UAU or UAC; and, at least a codon selected from the group consisting of GUU, GUC, GUA, and GUG.

[0413] In some specific embodiments, the limited codon set has been optimized for in vivo expression of a sequence optimized nucleic acid (e.g., a synthetic mRNA) following administration to a certain tissue or cell.

[0414] In some embodiments, the optimized codon set (e.g., a 20 codon set encoding 20 amino acids) complies at least with one of the following properties:
[0415] the optimized codon set has a higher average G/C content than the original or native codon set; or,
[0416] the optimized codon set has a lower average U content than the original or native codon set; or,
[0417] the optimized codon set is composed of codons with the highest frequency; or,
[0418] the optimized codon set is composed of codons with the lowest frequency; or, a combination thereof.

[0419] In some specific embodiments, at least one codon in the optimized codon set has the second highest, the third highest, the fourth highest, the fifth highest or the sixth highest frequency in the synonymous codon set. In some specific embodiments, at least one codon in the optimized codon has the second lowest, the third lowest, the fourth lowest, the fifth lowest, or the sixth lowest frequency in the synonymous codon set.

[0420] As used herein, the term “native codon set” refers to the codon set used natively by the source organism to encode the reference nucleic acid sequence. As used herein, the term “original codon set” refers to the codon set used to encode the reference nucleic acid sequence before the beginning of sequence optimization, or to a codon set used to encode an optimized variant of the reference nucleic acid sequence at the beginning of a new optimization iteration when sequence optimization is applied iteratively or recursively.

[0421] In some embodiments, 5%, 10%, 15%, 20%, 25%, 30%, 35%, 40%, 45%, 50%, 55%, 60%, 65%, 70%, 75%, 80%, 85%, 90%, 95% or 100% of codons in the codon set are those with the highest frequency. In other embodiments, 5%, 10%, 15%, 20%, 25%, 30%, 35%, 40%, 45%, 50%, 55%, 60%, 65%, 70%, 75%, 80%, 85%, 90%, 95% or 100% of codons in the codon set are those with the lowest frequency.

[0422] In some embodiments, 5%, 10%, 15%, 20%, 25%, 30%, 35%, 40%, 45%, 50%, 55%, 60%, 65%, 70%, 75%, 80%, 85%, 90%, 95% or 100% of codons in the codon set are those with the highest uridine content. In some embodiments, 5%, 10%, 15%, 20%, 25%, 30%, 35%, 40%, 45%, 50%, 55%, 60%, 65%, 70%, 75%, 80%, 85%, 90%, 95% or 100% of codons in the codon set are those with the lowest uridine content.

[0423] In some embodiments, the average G/C content (absolute or relative) of the codon set is 5%, 10%, 15%, 20%, 25%, 30%, 35%, 40%, 45%, 50%, 55%, 60%, 65%, 70%, 75%, 80%, 85%, 90%, 95% or 100% higher than the average G/C content (absolute or relative) of the original codon set. In some embodiments, the average G/C content (absolute or relative) of the codon set is 5%, 10%, 15%, 20%, 25%, 30%, 35%, 40%, 45%, 50%, 55%, 60%, 65%, 70%, 75%, 80%, 85%, 90%, 95% or 100% lower than the average G/C content (absolute or relative) of the original codon set.

[0424] In some embodiments, the uracil content (absolute or relative) of the codon set is 5%, 10%, 15%, 20%, 25%, 30%, 35%, 40%, 45%, 50%, 55%, 60%, 65%, 70%, 75%, 80%, 85%, 90%, 95% or 100% higher than the average uracil content (absolute or relative) of the original codon set. In some embodiments, the uracil content (absolute or relative) of the codon set is 5%, 10%, 15%, 20%, 25%, 30%, 35%, 40%, 45%, 50%, 55%, 60%, 65%, 70%, 75%, 80%, 85%, 90%, 95% or 100% lower than the average uracil content (absolute or relative) of the original codon set. See also U.S. Appl. Publ. No. 2011/0082055, and Int'l. Publ. No. WO2000018778, both of which are incorporated herein by reference in their entireties.

### Characterization of Sequence Optimized Nucleic Acids

[0425] In some embodiments of the invention, the polynucleotide (e.g., a RNA, e.g., a mRNA) comprising a sequence optimized nucleic acid disclosed herein encoding a polypeptide (e.g., BH3) can be can be tested to determine whether at least one nucleic acid sequence property (e.g., stability when exposed to nucleases) or expression property has been improved with respect to the non-sequence optimized nucleic acid.

[0426] As used herein, “expression property” refers to a property of a nucleic acid sequence either in vivo (e.g., translation efficacy of a synthetic mRNA after administration to a subject in need thereof) or in vitro (e.g., translation efficacy of a synthetic mRNA tested in an in vitro model system). Expression properties include but are not limited to the amount of protein produced by an mRNA encoding a polypeptide (e.g., BH3) after administration, and the amount of soluble or otherwise functional protein produced. In some embodiments, sequence optimized nucleic acids disclosed herein can be evaluated according to the viability of the cells expressing a protein encoded by a sequence optimized nucleic acid sequence (e.g., a RNA, e.g., a mRNA) encoding a polypeptide (e.g., BH3) disclosed herein.

[0427] In a particular embodiment, a plurality of sequence optimized nucleic acids disclosed herein (e.g., a RNA, e.g., a mRNA) containing codon substitutions with respect to the non-optimized reference nucleic acid sequence can be characterized functionally to measure a property of interest, for example an expression property in an in vitro model system, or in vivo in a target tissue or cell.

[0428] a. Optimization of Nucleic Acid Sequence Intrinsic Properties

[0429] In some embodiments of the invention, the desired property of the polynucleotide is an intrinsic property of the nucleic acid sequence. For example, the nucleotide sequence (e.g., a RNA, e.g., a mRNA) can be sequence optimized for in vivo or in vitro stability. In some embodiments, the nucleotide sequence can be sequence optimized for expression in a particular target tissue or cell. In some embodiments, the nucleic acid sequence is sequence optimized to increase its plasma half by preventing its degradation by endo and exonucleases.

[0430] In other embodiments, the nucleic acid sequence is sequence optimized to increase its resistance to hydrolysis in solution, for example, to lengthen the time that the sequence optimized nucleic acid or a pharmaceutical composition comprising the sequence optimized nucleic acid can be stored under aqueous conditions with minimal degradation.

[0431] In other embodiments, the sequence optimized nucleic acid can be optimized to increase its resistance to hydrolysis in dry storage conditions, for example, to lengthen the time that the sequence optimized nucleic acid can be stored after lyophilization with minimal degradation.

[0432] b. Nucleic Acids Sequence Optimized for Protein Expression

[0433] In some embodiments of the invention, the desired property of the polynucleotide is the level of expression of a polypeptide (e.g., BH3) encoded by a sequence optimized sequence disclosed herein. Protein expression levels can be measured using one or more expression systems. In some embodiments, expression can be measured in cell culture systems, e.g., CHO cells or HEK293 cells. In some embodiments, expression can be measured using in vitro expression systems prepared from extracts of living cells, e.g., rabbit reticulocyte lysates, or in vitro expression systems prepared by assembly of purified individual components. In other embodiments, the protein expression is measured in an in vivo system, e.g., mouse, rabbit, monkey, etc.

[0434] In some embodiments, protein expression in solution form can be desirable. Accordingly, in some embodiments, a reference sequence can be sequence optimized to yield a sequence optimized nucleic acid sequence having optimized levels of expressed proteins in soluble form. Levels of protein expression and other properties such as solubility, levels of aggregation, and the presence of truncation products (i.e., fragments due to proteolysis, hydrolysis, or defective translation) can be measured according to methods known in the art, for example, using electrophoresis (e.g., native or SDS-PAGE) or chromatographic methods (e.g., HPLC, size exclusion chromatography, etc.).

[0435] c. Optimization of Target Tissue or Target Cell Viability

[0436] In some embodiments, the expression of heterologous therapeutic proteins encoded by a nucleic acid sequence can have deleterious effects in the target tissue or cell, reducing protein yield, or reducing the quality of the expressed product (e.g., due to the presence of protein fragments or precipitation of the expressed protein in inclusion bodies), or causing toxicity.

[0437] Accordingly, in some embodiments of the invention, the sequence optimization of a nucleic acid sequence disclosed herein, e.g., a nucleic acid sequence encoding a polypeptide (e.g., BH3), can be used to increase the viability of target cells expressing the protein encoded by the sequence optimized nucleic acid.

[0438] Heterologous protein expression can also be deleterious to cells transfected with a nucleic acid sequence for autologous or heterologous transplantation. Accordingly, in some embodiments of the present disclosure the sequence optimization of a nucleic acid sequence disclosed herein can be used to increase the viability of target cells expressing the protein encoded by the sequence optimized nucleic acid sequence. Changes in cell or tissue viability, toxicity, and other physiological reaction can be measured according to methods known in the art.

[0439] d. Reduction of Immune and/or Inflammatory Response

[0440] In some cases, the administration of a sequence optimized nucleic acid encoding a polypeptide (e.g., BH3) or a functional fragment thereof can trigger an immune response, which could be caused by (i) the therapeutic agent (e.g., an mRNA encoding a BH3 polypeptide), or (ii) the expression product of such therapeutic agent (e.g., the BH3 polypeptide encoded by the mRNA), or (iv) a combination thereof. Accordingly, in some embodiments of the present disclosure the sequence optimization of nucleic acid sequence (e.g., an mRNA) disclosed herein can be used to decrease an immune or inflammatory response triggered by the administration of a nucleic acid encoding a polypeptide (e.g., BH3) or by the expression product of a polypeptide (e.g., BH3) encoded by such nucleic acid.

[0441] In some aspects, an inflammatory response can be measured by detecting increased levels of one or more inflammatory cytokines using methods known in the art, e.g., ELISA. The term “inflammatory cytokine” refers to cytokines that are elevated in an inflammatory response. Examples of inflammatory cytokines include interleukin-6 (IL-6), CXCL1 (chemokine (C-X-C motif) ligand 1; also known as GROα, interferon-γ (IFNγ), tumor necrosis factor α (TNFα), interferon γ-induced protein 10 (IP-10), or granulocyte-colony stimulating factor (G-CSF). The term inflammatory cytokines includes also other cytokines associated with inflammatory responses known in the art, e.g., interleukin-1 (IL-1), interleukin-8 (IL-8), interleukin-12 (IL-12), interleukin-13 (Il-13), interferon α (IFN-α), etc.

### Modified Nucleotide Sequences Encoding Polypeptides

[0442] In some embodiments, the polynucleotide of the invention (e.g., a RNA, e.g., a mRNA) comprises a chemically modified nucleobase, e.g., 5-methoxyuracil. In some embodiments, the mRNA is a uracil-modified sequence comprising an ORF encoding a polypeptide described herein (e.g., BH3), wherein the mRNA comprises a chemically modified nucleobase, e.g., 5-methoxyuracil.

[0443] In certain aspects of the invention, when the 5-methoxyuracil base is connected to a ribose sugar, as it is in polynucleotides, the resulting modified nucleoside or nucleotide is referred to as 5-methoxyuridine. In some embodiments, uracil in the polynucleotide is at least about 25%, at least about 30%, at least about 40%, at least about 50%, at least about 60%, at least about 70%, at least about 80%, at least 90%, at least 95%, at least 99%, or about 100% 5-methoxyuracil. In one embodiment, uracil in the polynucleotide is at least 95% 5-methoxyuracil. In another embodiment, uracil in the polynucleotide is 100% 5-methoxyuracil.

[0444] In embodiments where uracil in the polynucleotide is at least 95% 5-methoxyuracil, overall uracil content can be adjusted such that the polynucleotide of the invention (e.g., a RNA, e.g., a mRNA) provides suitable protein expression levels while inducing little to no immune response.

[0445] In some embodiments, the uracil content of the ORF is between about 105% and about 145%, about 105% and about 140%, about 110% and about 140%, about 110% and about 145%, about 115% and about 135%, about 105% and about 135%, about 110% and about 135%, about 115% and about 145%, or about 115% and about 140% of the theoretical minimum uracil content in the corresponding wild-type ORF (% U_{TM}). In other embodiments, the uracil content of the ORF is between about 117% and about 134% or between 118% and 132% of the % U_{TM}. In some embodiments, the uracil content of the ORF encoding a polypeptide (e.g., BH3) is about 115%, about 120%, about 125%, about 130%, about 135%, about 140%, about 145%, or about 150% of the % U_{TM}. In this context, the term “uracil” can refer to 5-methoxyuracil and/or naturally occurring uracil.

[0446] In some embodiments, the uracil content in the ORF of the mRNA encoding a polypeptide of the invention (e.g., BH3) is less than about 50%, about 40%, about 30%, or about 20% of the total nucleobase content in the ORF. In some embodiments, the uracil content in the ORF is between about 15% and about 25% of the total nucleobase content in the ORF. In other embodiments, the uracil content in the ORF is between about 20% and about 30% of the total nucleobase content in the ORF. In one embodiment, the uracil content in the ORF of the mRNA encoding a polypeptide (e.g., BH3) is less than about 20% of the total nucleobase content in the open reading frame. In this context, the term “uracil” can refer to 5-methoxyuracil and/or naturally occurring uracil.

[0447] In further embodiments, the ORF of the mRNA encoding a polypeptide (e.g., BH3) having 5-methoxyuracil and adjusted uracil content has increased Cytosine (C), Guanine (G), or Guanine/Cytosine (G/C) content (absolute or relative). In some embodiments, the overall increase in C, G, or G/C content (absolute or relative) of the ORF is at least about 2%, at least about 3%, at least about 4%, at least about 5%, at least about 6%, at least about 7%, at least about 10%, at least about 15%, at least about 20%, at least about 40%, at least about 50%, at least about 60%, at least about 70%, at least about 80%, at least about 90%, at least about 95%, or at least about 100% relative to the G/C content (absolute or relative) of the wild-type ORF. In some embodiments, the G, the C, or the G/C content in the ORF is less than about 100%, less than about 90%, less than about 85%, or less than about 80% of the theoretical maximum G, C, or G/C content of the corresponding wild type nucleotide sequence encoding the polypeptide (e.g., BH3) (% G_{TMX}; % C_{TMX}, or % G/C_{TMX}). In other embodiments, the G, the C, or the G/C content in the ORF is between about 70% and about 80%, between about 71% and about 79%, between about 71% and about 78%, or between about 71% and about 77% of the % G_{TMX}, % C_{TMX}, or % G/C_{TMX}. In some embodiments, the increases in G and/or C content (absolute or relative) described herein can be conducted by replacing synonymous codons with low G, C, or G/C content with synonymous codons having higher G, C, or G/C content. In other embodiments, the increase in G and/or C content (absolute or relative) is conducted by replacing a codon ending with U with a synonymous codon ending with G or C.

[0448] In further embodiments, the ORF of the mRNA encoding a polypeptide of the invention (e.g., BH3) comprises 5-methoxyuracil and has an adjusted uracil content containing less uracil pairs (UU) and/or uracil triplets (UUU) and/or uracil quadruplets (UUUU) than the corresponding wild-type nucleotide sequence encoding the polypeptide (e.g., BH3). In some embodiments, the ORF of the mRNA encoding a polypeptide of the invention (e.g., BH3) contains no uracil pairs and/or uracil triplets and/or uracil quadruplets. In some embodiments, uracil pairs and/or uracil triplets and/or uracil quadruplets are reduced below a certain threshold, e.g., no more than 1, 2, 3, 4, 5, 6, 7, 8, 9, 10, 11, 12, 13, 14, 15, 16, 17, 18, 19, or 20 occurrences in the ORF of the mRNA encoding the polypeptide (e.g., BH3). In a particular embodiment, the ORF of the mRNA encoding the polypeptide of the invention (e.g., BH3) contains less than 20, 19, 18, 17, 16, 15, 14, 13, 12, 11, 10, 9, 8, 7, 6, 5, 4, 3, 2, or 1 non-phenylalanine uracil pairs and/or triplets. In another embodiment, the ORF of the mRNA encoding the polypeptide (e.g., BH3) contains no non-phenylalanine uracil pairs and/or triplets.

[0449] In further embodiments, the ORF of the mRNA encoding a polypeptide of the invention (e.g., BH3) comprises 5-methoxyuracil and has an adjusted uracil content containing less uracil-rich clusters than the corresponding wild-type nucleotide sequence encoding the polypeptide. In some embodiments, the ORF of the mRNA encoding the polypeptide of the invention (e.g., BH3) contains uracil-rich clusters that are shorter in length than corresponding uracil-rich clusters in the corresponding wild-type nucleotide sequence encoding the polypeptide.

[0450] In further embodiments, alternative lower frequency codons are employed. At least about 5%, at least about 10%, at least about 15%, at least about 20%, at least about 25%, at least about 30%, at least about 35%, at least about 40%, at least about 45%, at least about 50%, at least about 55%, at least about 60%, at least about 65%, at least about 70%, at least about 75%, at least about 80%, at least about 85%, at least about 90%, at least about 95%, at least about 99%, or 100% of the codons in the polypeptide (e.g., BH3)-encoding ORF of the 5-methoxyuracil-comprising mRNA are substituted with alternative codons, each alternative codon having a codon frequency lower than the codon frequency of the substituted codon in the synonymous codon set. The ORF also has adjusted uracil content, as described above. In some embodiments, at least one codon in the ORF of the mRNA encoding the polypeptide (e.g., BH3) is substituted with an alternative codon having a codon frequency lower than the codon frequency of the substituted codon in the synonymous codon set.

[0451] In some embodiments, the adjusted uracil content, polypeptide (e.g., BH3)-encoding ORF of the 5-methoxyuracil-comprising mRNA exhibits expression levels of the polypeptide when administered to a mammalian cell that are higher than expression levels of the polypeptide from the corresponding wild-type mRNA. In other embodiments, the expression levels of the polypeptide (e.g., BH3) when administered to a mammalian cell are increased relative to a corresponding mRNA containing at least 95% 5-methoxyuracil and having a uracil content of about 160%, about 170%, about 180%, about 190%, or about 200% of the theoretical minimum. In yet other embodiments, the expression levels of the polypeptide (e.g., BH3) when administered to a mammalian cell are increased relative to a corresponding mRNA, wherein at least about 50%, at least about 60%, at least about 70%, at least about 80%, at least about 90%, or about 100% of uracils are 1-methylpseudouracil or pseudouracils. In some embodiments, the mammalian cell is a mouse cell, a rat cell, or a rabbit cell. In other embodiments, the mammalian cell is a monkey cell or a human cell. In some embodiments, the human cell is a HeLa cell, a BJ fibroblast cell, or a peripheral blood mononuclear cell (PBMC). In some embodiments, the polypeptide (e.g., BH3) is expressed when the mRNA is administered to a mammalian cell in vivo. In some embodiments, the mRNA is administered to mice, rabbits, rats, monkeys, or humans. In one embodiment, mice are null mice. In some embodiments, the mRNA is administered to mice in an amount of about 0.01 mg/kg, about 0.05 mg/kg, about 0.1 mg/kg, or about 0.15 mg/kg. In some embodiments, the mRNA is administered intravenously or intramuscularly. In other embodiments, the polypeptide (e.g., BH3) is expressed when the mRNA is administered to a mammalian cell in vitro. In some embodiments, the expression is increased by at least about 2-fold, at least about 5-fold, at least about 10-fold, at least about 50-fold, at least about 500-fold, at least about 1500-fold, or at least about 3000-fold. In other embodiments, the expression is increased by at least about 10%, about 20%, about 30%, about 40%, about 50%, 60%, about 70%, about 80%, about 90%, or about 100%.

[0452] In some embodiments, adjusted uracil content, polypeptide (e.g., BH3)-encoding ORF of the 5-methoxyuracil-comprising mRNA exhibits increased stability. In some embodiments, the mRNA exhibits increased stability in a cell relative to the stability of a corresponding wild-type mRNA under the same conditions. In some embodiments, the mRNA exhibits increased stability including resistance to nucleases, thermal stability, and/or increased stabilization of secondary structure. In some embodiments, increased stability exhibited by the mRNA is measured by determining the half-life of the mRNA (e.g., in a plasma, cell, or tissue sample) and/or determining the area under the curve (AUC) of the protein expression by the mRNA over time (e.g., in vitro or in vivo). An mRNA is identified as having increased stability if the half-life and/or the AUC is greater than the half-life and/or the AUC of a corresponding wild-type mRNA under the same conditions.

[0453] In some embodiments, the mRNA of the present invention induces a detectably lower immune response (e.g., innate or acquired) relative to the immune response induced by a corresponding wild-type mRNA under the same conditions. In other embodiments, the mRNA of the present disclosure induces a detectably lower immune response (e.g., innate or acquired) relative to the immune response induced by an mRNA that encodes for a polypeptide (e.g., BH3) but does not comprise 5-methoxyuracil under the same conditions, or relative to the immune response induced by an mRNA that encodes for a polypeptide (e.g., BH3) and that comprises 5-methoxyuracil but that does not have adjusted uracil content under the same conditions. The innate immune response can be manifested by increased expression of pro-inflammatory cytokines, activation of intracellular PRRs (RIG-I, MDA5, etc), cell death, and/or termination or reduction in protein translation. In some embodiments, a reduction in the innate immune response can be measured by expression or activity level of Type 1 interferons (e.g., IFN-α, IFN-β, IFN-κ, IFN-δ, IFN-ε, IFN-τ, IFN-ω, and IFN-ζ) or the expression of interferon-regulated genes such as the toll-like receptors (e.g., TLR7 and TLR8), and/or by decreased cell death following one or more administrations of the mRNA of the invention into a cell.

[0454] In some embodiments, the expression of Type-1 interferons by a mammalian cell in response to the mRNA of the present disclosure is reduced by at least 10%, 20%, 30%, 40%, 50%, 60%, 70%, 80%, 90%, 95%, 99%, 99.9%, or greater than 99.9% relative to a corresponding wild-type mRNA, to an mRNA that encodes a polypeptide (e.g., BH3) but does not comprise 5-methoxyuracil, or to an mRNA that encodes a polypeptide (e.g., BH3) and that comprises 5-methoxyuracil but that does not have adjusted uracil content. In some embodiments, the interferon is IFN-β. In some embodiments, cell death frequency cased by administration of mRNA of the present disclosure to a mammalian cell is 10%, 25%, 50%, 75%, 85%, 90%, 95%, or over 95% less than the cell death frequency observed with a corresponding wild-type mRNA, an mRNA that encodes for a polypeptide (e.g., BH3) but does not comprise 5-methoxyuracil, or an mRNA that encodes for a polypeptide (e.g., BH3) and that comprises 5-methoxyuracil but that does not have adjusted uracil content. In some embodiments, the mammalian cell is a BJ fibroblast cell. In other embodiments, the mammalian cell is a splenocyte. In some embodiments, the mammalian cell is that of a mouse or a rat. In other embodiments, the mammalian cell is that of a human. In one embodiment, the mRNA of the present disclosure does not substantially induce an innate immune response of a mammalian cell into which the mRNA is introduced.

[0455] In some embodiments, the polynucleotide is an mRNA that comprises an ORF that encodes a polypeptide (e.g., BH3), wherein uracil in the mRNA is at least about 95% 5-methoxyuracil, wherein the uracil content of the ORF is between about 115% and about 135% of the theoretical minimum uracil content in the corresponding wild-type ORF, and wherein the uracil content in the ORF encoding the polypeptide (e.g., BH3) is less than about 30% of the total nucleobase content in the ORF. In some embodiments, the ORF that encodes the polypeptide (e.g., BH3) is further modified to increase G/C content of the ORF (absolute or relative) by at least about 40%, as compared to the corresponding wild-type ORF. In yet other embodiment, the ORF encoding the polypeptide (e.g., BH3) contains less than 20 non-phenylalanine uracil pairs and/or triplets. In some embodiments, at least one codon in the ORF of the mRNA encoding the polypeptide (e.g., BH3) is further substituted with an alternative codon having a codon frequency lower than the codon frequency of the substituted codon in the synonymous codon set. In some embodiments, the expression of the polypeptide (e.g., BH3) encoded by an mRNA comprising an ORF wherein uracil in the mRNA is at least about 95% 5-methoxyuracil, and wherein the uracil content of the ORF is between about 115% and about 135% of the theoretical minimum uracil content in the corresponding wild-type ORF, is increased by at least about 10-fold when compared to expression of the polypeptide (e.g., BH3) from the corresponding wild-type mRNA. In some embodiments, the mRNA comprises an open ORF wherein uracil in the mRNA is at least about 95% 5-methoxyuracil, and wherein the uracil content of the ORF is between about 115% and about 135% of the theoretical minimum uracil content in the corresponding wild-type ORF, and wherein the mRNA does not substantially induce an innate immune response of a mammalian cell into which the mRNA is introduced.

### Methods for Modifying Polynucleotides

[0456] The invention includes modified polynucleotides comprising a polynucleotide described herein (e.g., a polynucleotide comprising a nucleotide sequence encoding a BH3 polypeptide). The modified polynucleotides can be chemically modified and/or structurally modified. When the polynucleotides of the present invention are chemically and/or structurally modified the polynucleotides can be referred to as “modified polynucleotides.”

[0457] The present disclosure provides for modified nucleosides and nucleotides of a polynucleotide (e.g., RNA polynucleotides, such as mRNA polynucleotides) encoding a BH3 polypeptide. A “nucleoside” refers to a compound containing a sugar molecule (e.g., a pentose or ribose) or a derivative thereof in combination with an organic base (e.g., a purine or pyrimidine) or a derivative thereof (also referred to herein as “nucleobase”). A “nucleotide” refers to a nucleoside including a phosphate group. Modified nucleotides can be synthesized by any useful method, such as, for example, chemically, enzymatically, or recombinantly, to include one or more modified or non-natural nucleosides. Polynucleotides can comprise a region or regions of linked nucleosides. Such regions can have variable backbone linkages. The linkages can be standard phosphodiester linkages, in which case the polynucleotides would comprise regions of nucleotides.

[0458] The modified polynucleotides disclosed herein can comprise various distinct modifications. In some embodiments, the modified polynucleotides contain one, two, or more (optionally different) nucleoside or nucleotide modifications. In some embodiments, a modified polynucleotide, introduced to a cell can exhibit one or more desirable properties, e.g., improved protein expression, reduced immunogenicity, or reduced degradation in the cell, as compared to an unmodified polynucleotide.

[0459] a. Structural Modifications

[0460] In some embodiments, a polynucleotide of the present invention (e.g., a polynucleotide comprising a nucleotide sequence encoding a BH3 polypeptide) is structurally modified. As used herein, a “structural” modification is one in which two or more linked nucleosides are inserted, deleted, duplicated, inverted or randomized in a polynucleotide without significant chemical modification to the nucleotides themselves. Because chemical bonds will necessarily be broken and reformed to effect a structural modification, structural modifications are of a chemical nature and hence are chemical modifications. However, structural modifications will result in a different sequence of nucleotides. For example, the polynucleotide “ATCG” can be chemically modified to “AT-5meC-G”. The same polynucleotide can be structurally modified from “ATCG” to “ATCCCG”. Here, the dinucleotide “CC” has been inserted, resulting in a structural modification to the polynucleotide.

[0461] b. Chemical Modifications

[0462] In some embodiments, the polynucleotides of the present invention (e.g., a polynucleotide comprising a nucleotide sequence encoding a BH3 polypeptide) are chemically modified. As used herein in reference to a polynucleotide, the terms “chemical modification” or, as appropriate, “chemically modified” refer to modification with respect to adenosine (A), guanosine (G), uridine (U), thymidine (T) or cytidine (C) ribo- or deoxyribonucleosides in one or more of their position, pattern, percent or population, including, but not limited to, its nucleobase, sugar, backbone, or any combination thereof. Generally, herein, these terms are not intended to refer to the ribonucleotide modifications in naturally occurring 5′-terminal mRNA cap moieties.

[0463] In some embodiments, the polynucleotides of the invention (e.g., a polynucleotide comprising a nucleotide sequence encoding a BH3 polypeptide) can have a uniform chemical modification of all or any of the same nucleoside type or a population of modifications produced by downward titration of the same starting modification in all or any of the same nucleoside type, or a measured percent of a chemical modification of all any of the same nucleoside type but with random incorporation, such as where all uridines are replaced by a uridine analog, e.g., 5-methoxyuridine. In another embodiment, the polynucleotides can have a uniform chemical modification of two, three, or four of the same nucleoside type throughout the entire polynucleotide (such as all uridines and/or all cytidines, etc. are modified in the same way).

[0464] Modified nucleotide base pairing encompasses not only the standard adenine-thymine, adenine-uracil, or guanine-cytosine base pairs, but also base pairs formed between nucleotides and/or modified nucleotides comprising non-standard or modified bases, wherein the arrangement of hydrogen bond donors and hydrogen bond acceptors permits hydrogen bonding between a non-standard base and a standard base or between two complementary non-standard base structures. One example of such non-standard base pairing is the base pairing between the modified nucleobase inosine and adenine, cytosine or uracil. Any combination of base/sugar or linker can be incorporated into polynucleotides of the present disclosure.

[0465] The skilled artisan will appreciate that, except where otherwise noted, polynucleotide sequences set forth in the instant application will recite “T”s in a representative DNA sequence but where the sequence represents RNA, the “T”s would be substituted for “U”s.

[0466] Modifications of polynucleotides (e.g., RNA polynucleotides, such as mRNA polynucleotides) that are useful in the compositions, methods and synthetic processes of the present disclosure include, but are not limited to the following nucleotides, nucleosides and nucleobases: 2-methylthio-N6-(cis-hydroxyisopentenyl)adenosine; 2-methylthio-N6-methyladenosine; 2-methylthio-N6-threonyl carbamoyladenosine; N6-glycinylcarbamoyladenosine; N6-isopentenyladenosine; N6-methyladenosine; N6-threonylcarbamoyladenosine; 1,2′-O-dimethyladenosine; 1-methyladenosine; 2′-O-methyladenosine; 2′-O-ribosyladenosine (phosphate); 2-methyladenosine; 2-methylthio-N6 isopentenyladenosine; 2-methylthio-N6-hydroxynorvalyl carbamoyladenosine; 2′-O-methyladenosine; 2′-O-ribosyladenosine (phosphate); Isopentenyladenosine; N6-(cis-hydroxyisopentenyl)adenosine; N6,2′-O-dimethyladenosine; N6,2′-O-dimethyladenosine; N6,N6,2′-O-trimethyladenosine; N6,N6-dimethyladenosine; N6-acetyladenosine; N6-hydroxynorvalylcarbamoyladenosine; N6-methyl-N6-threonylcarbamoyladenosine; 2-methyladenosine; 2-methylthio-N6-isopentenyladenosine; 7-deaza-adenosine; N1-methyl-adenosine; N6, N6 (dimethyl)adenine; N6-cis-hydroxy-isopentenyl-adenosine; α-thio-adenosine; 2 (amino)adenine; 2 (aminopropyl)adenine; 2 (methylthio) N6 (isopentenyl)adenine; 2-(alkyl)adenine; 2-(aminoalkyl)adenine; 2-(aminopropyl)adenine; 2-(halo)adenine; 2-(halo)adenine; 2-(propyl)adenine; 2′-Amino-2′-deoxy-ATP; 2′-Azido-2′-deoxy-ATP; 2′-Deoxy-2′-a-aminoadenosine TP; 2′-Deoxy-2′-a-azidoadenosine TP; 6 (alkyl)adenine; 6 (methyl)adenine; 6-(alkyl)adenine; 6-(methyl)adenine; 7 (deaza)adenine; 8 (alkenyl)adenine; 8 (alkynyl)adenine; 8 (amino)adenine; 8 (thioalkyl)adenine; 8-(alkenyl)adenine; 8-(alkyl)adenine; 8-(alkynyl)adenine; 8-(amino)adenine; 8-(halo)adenine; 8-(hydroxyl)adenine; 8-(thioalkyl)adenine; 8-(thiol)adenine; 8-azido-adenosine; aza adenine; deaza adenine; N6 (methyl)adenine; N6-(isopentyl)adenine; 7-deaza-8-aza-adenosine; 7-methyladenine; 1-Deazaadenosine TP; 2′Fluoro-N6-Bz-deoxyadenosine TP; 2′-OMe-2-Amino-ATP; 2′O-methyl-N6-Bz-deoxyadenosine TP; 2′-a-Ethynyladenosine TP; 2-aminoadenine; 2-Aminoadenosine TP; 2-Amino-ATP; 2′-a-Trifluoromethyladenosine TP; 2-Azidoadenosine TP; 2′-b-Ethynyladenosine TP; 2-Bromoadenosine TP; 2′-b-Trifluoromethyladenosine TP; 2-Chloroadenosine TP; 2′-Deoxy-2′,2′-difluoroadenosine TP; 2′-Deoxy-2′-a-mercaptoadenosine TP; 2′-Deoxy-2′-α-thiomethoxyadenosine TP; 2′-Deoxy-2′-b-aminoadenosine TP; 2′-Deoxy-2′-b-azidoadenosine TP; 2′-Deoxy-2′-b-bromoadenosine TP; 2′-Deoxy-2′-b-chloroadenosine TP; 2′-Deoxy-2′-b-fluoroadenosine TP; 2′-Deoxy-2′-b-iodoadenosine TP; 2′-Deoxy-2′-b-mercaptoadenosine TP; 2′-Deoxy-2′-b-thiomethoxyadenosine TP; 2-Fluoroadenosine TP; 2-Iodoadenosine TP; 2-Mercaptoadenosine TP; 2-methoxy-adenine; 2-methylthio-adenine; 2-Trifluoromethyladenosine TP; 3-Deaza-3-bromoadenosine TP; 3-Deaza-3-chloroadenosine TP; 3-Deaza-3-fluoroadenosine TP; 3-Deaza-3-iodoadenosine TP; 3-Deazaadenosine TP; 4′-Azidoadenosine TP; 4′-Carbocyclic adenosine TP; 4′-Ethynyladenosine TP; 5′-Homo-adenosine TP; 8-Aza-ATP; 8-bromo-adenosine TP; 8-Trifluoromethyladenosine TP; 9-Deazaadenosine TP; 2-aminopurine; 7-deaza-2,6-diaminopurine; 7-deaza-8-aza-2,6-diaminopurine; 7-deaza-8-aza-2-aminopurine; 2,6-diaminopurine; 7-deaza-8-aza-adenine, 7-deaza-2-aminopurine; 2-thiocytidine; 3-methylcytidine; 5-formylcytidine; 5-hydroxymethylcytidine; 5-methylcytidine; N4-acetylcytidine; 2′-O-methylcytidine; 2′-O-methylcytidine; 5,2′-O-dimethylcytidine; 5-formyl-2′-O-methylcytidine; Lysidine; N4,2′-O-dimethylcytidine; N4-acetyl-2′-O-methylcytidine; N4-methylcytidine; N4,N4-Dimethyl-2′-OMe-Cytidine TP; 4-methylcytidine; 5-aza-cytidine; Pseudo-iso-cytidine; pyrrolo-cytidine; α-thio-cytidine; 2-(thio)cytosine; 2′-Amino-2′-deoxy-CTP; 2′-Azido-2′-deoxy-CTP; 2′-Deoxy-2′-a-aminocytidine TP; 2′-Deoxy-2′-a-azidocytidine TP; 3 (deaza) 5 (aza)cytosine; 3 (methyl)cytosine; 3-(alkyl)cytosine; 3-(deaza) 5 (aza)cytosine; 3-(methyl)cytidine; 4,2′-O-dimethylcytidine; 5 (halo)cytosine; 5 (methyl)cytosine; 5 (propynyl)cytosine; 5 (trifluoromethyl)cytosine; 5-(alkyl)cytosine; 5-(alkynyl)cytosine; 5-(halo)cytosine; 5-(propynyl)cytosine; 5-(trifluoromethyl)cytosine; 5-bromo-cytidine; 5-iodo-cytidine; 5-propynyl cytosine; 6-(azo)cytosine; 6-aza-cytidine; aza cytosine; deaza cytosine; N4 (acetyl)cytosine; 1-methyl-1-deaza-pseudoisocytidine; 1-methyl-pseudoisocytidine; 2-methoxy-5-methyl-cytidine; 2-methoxy-cytidine; 2-thio-5-methyl-cytidine; 4-methoxy-1-methyl-pseudoisocytidine; 4-methoxy-pseudoisocytidine; 4-thio-1-methyl-1-deaza-pseudoisocytidine; 4-thio-1-methyl-pseudoisocytidine; 4-thio-pseudoisocytidine; 5-aza-zebularine; 5-methyl-zebularine; pyrrolo-pseudoisocytidine; Zebularine; (E)-5-(2-Bromo-vinyl)cytidine TP; 2,2′-anhydro-cytidine TP hydrochloride; 2′Fluor-N4-Bz-cytidine TP; 2′Fluoro-N4-Acetyl-cytidine TP; 2′-O-Methyl-N4-Acetyl-cytidine TP; 2′O-methyl-N4-Bz-cytidine TP; 2′-a-Ethynylcytidine TP; 2′-a-Trifluoromethylcytidine TP; 2′-b-Ethynylcytidine TP; 2′-b-Trifluoromethylcytidine TP; 2′-Deoxy-2′,2′-difluorocytidine TP; 2′-Deoxy-2′-a-mercaptocytidine TP; 2′-Deoxy-2′-α-thiomethoxycytidine TP; 2′-Deoxy-2′-b-aminocytidine TP; 2′-Deoxy-2′-b-azidocytidine TP; 2′-Deoxy-2′-b-bromocytidine TP; 2′-Deoxy-2′-b-chlorocytidine TP; 2′-Deoxy-2′-b-fluorocytidine TP; 2′-Deoxy-2′-b-iodocytidine TP; 2′-Deoxy-2′-b-mercaptocytidine TP; 2′-Deoxy-2′-b-thiomethoxycytidine TP; 2′-O-Methyl-5-(1-propynyl)cytidine TP; 3′-Ethynylcytidine TP; 4′-Azidocytidine TP; 4′-Carbocyclic cytidine TP; 4′-Ethynylcytidine TP; 5-(1-Propynyl)ara-cytidine TP; 5-(2-Chloro-phenyl)-2-thiocytidine TP; 5-(4-Amino-phenyl)-2-thiocytidine TP; 5-Aminoallyl-CTP; 5-Cyanocytidine TP; 5-Ethynylara-cytidine TP; 5-Ethynylcytidine TP; 5′-Homo-cytidine TP; 5-Methoxycytidine TP; 5-Trifluoromethyl-Cytidine TP; N4-Amino-cytidine TP; N4-Benzoyl-cytidine TP; Pseudoisocytidine; 7-methylguanosine; N2,2′-O-dimethylguanosine; N2-methylguanosine; Wyosine; 1,2′-O-dimethylguanosine; 1-methylguanosine; 2′-O-methylguanosine; 2′-O-ribosylguanosine (phosphate); 2′-O-methylguanosine; 2′-O-ribosylguanosine (phosphate); 7-aminomethyl-7-deazaguanosine; 7-cyano-7-deazaguanosine; Archaeosine; Methylwyosine; N2,7-dimethylguanosine; N2,N2,2′-O-trimethylguanosine; N2,N2,7-trimethylguanosine; N2,N2-dimethylguanosine; N2,7,2′-O-trimethylguanosine; 6-thio-guanosine; 7-deaza-guanosine; 8-oxo-guanosine; N1-methyl-guanosine; α-thio-guanosine; 2 (propyl)guanine; 2-(alkyl)guanine; 2′-Amino-2′-deoxy-GTP; 2′-Azido-2′-deoxy-GTP; 2′-Deoxy-2′-a-aminoguanosine TP; 2′-Deoxy-2′-a-azidoguanosine TP; 6 (methyl)guanine; 6-(alkyl)guanine; 6-(methyl)guanine; 6-methyl-guanosine; 7 (alkyl)guanine; 7 (deaza)guanine; 7 (methyl)guanine; 7-(alkyl)guanine; 7-(deaza)guanine; 7-(methyl)guanine; 8 (alkyl)guanine; 8 (alkynyl)guanine; 8 (halo)guanine; 8 (thioalkyl)guanine; 8-(alkenyl)guanine; 8-(alkyl)guanine; 8-(alkynyl)guanine; 8-(amino)guanine; 8-(halo)guanine; 8-(hydroxyl)guanine; 8-(thioalkyl)guanine; 8-(thiol)guanine; aza guanine; deaza guanine; N (methyl)guanine; N-(methyl)guanine; 1-methyl-6-thio-guanosine; 6-methoxy-guanosine; 6-thio-7-deaza-8-aza-guanosine; 6-thio-7-deaza-guanosine; 6-thio-7-methyl-guanosine; 7-deaza-8-aza-guanosine; 7-methyl-8-oxo-guanosine; N2,N2-dimethyl-6-thio-guanosine; N2-methyl-6-thio-guanosine; 1-Me-GTP; 2′Fluoro-N2-isobutyl-guanosine TP; 2′O-methyl-N2-isobutyl-guanosine TP; 2′-a-Ethynylguanosine TP; 2′-a-Trifluoromethylguanosine TP; 2′-b-Ethynylguanosine TP; 2′-b-Trifluoromethylguanosine TP; 2′-Deoxy-2′,2′-difluoroguanosine TP; 2′-Deoxy-2′-a-mercaptoguanosine TP; 2′-Deoxy-2′-a-thiomethoxyguanosine TP; 2′-Deoxy-2′-b-aminoguanosine TP; 2′-Deoxy-2′-b-azidoguanosine TP; 2′-Deoxy-2′-b-bromoguanosine TP; 2′-Deoxy-2′-b-chloroguanosine TP; 2′-Deoxy-2′-b-fluoroguanosine TP; 2′-Deoxy-2′-b-iodoguanosine TP; 2′-Deoxy-2′-b-mercaptoguanosine TP; 2′-Deoxy-2′-b-thiomethoxyguanosine TP; 4′-Azidoguanosine TP; 4′-Carbocyclic guanosine TP; 4′-Ethynylguanosine TP; 5′-Homo-guanosine TP; 8-bromo-guanosine TP; 9-Deazaguanosine TP; N2-isobutyl-guanosine TP; 1-methylinosine; Inosine; 1,2′-O-dimethylinosine; 2′-O-methylinosine; 7-methylinosine; 2′-O-methylinosine; Epoxyqueuosine; galactosyl-queuosine; Mannosylqueuosine; Queuosine; allyamino-thymidine; aza thymidine; deaza thymidine; deoxy-thymidine; 2′-O-methyluridine; 2-thiouridine; 3-methyluridine; 5-carboxymethyluridine; 5-hydroxyuridine; 5-methyluridine; 5-taurinomethyl-2-thiouridine; 5-taurinomethyluridine; Dihydrouridine; Pseudouridine; (3-(3-amino-3-carboxypropyl)uridine; 1-methyl-3-(3-amino-5-carboxypropyl)pseudouridine; 1-methylpseduouridine; 1-ethyl-pseudouridine; 2′-O-methyluridine; 2′-O-methylpseudouridine; 2′-O-methyluridine; 2-thio-2′-O-methyluridine; 3-(3-amino-3-carboxypropyl)uridine; 3,2′-O-dimethyluridine; 3-Methyl-pseudo-Uridine TP; 4-thiouridine; 5-(carboxyhydroxymethyl)uridine; 5-(carboxyhydroxymethyl)uridine methyl ester; 5,2′-O-dimethyluridine; 5,6-dihydro-uridine; 5-aminomethyl-2-thiouridine; 5-carbamoylmethyl-2′-O-methyluridine; 5-carbamoylmethyluridine; 5-carboxyhydroxymethyluridine; 5-carboxyhydroxymethyluridine methyl ester; 5-carboxymethylaminomethyl-2′-O-methyluridine; 5-carboxymethylaminomethyl-2-thiouridine; 5-carboxymethylaminomethyl-2-thiouridine; 5-carboxymethylaminomethyluridine; 5-carboxymethylaminomethyluridine; 5-Carbamoylmethyluridine TP; 5-methoxycarbonylmethyl-2′-O-methyluridine; 5-methoxycarbonylmethyl-2-thiouridine; 5-methoxycarbonylmethyluridine; 5-methyluridine,), 5-methoxyuridine; 5-methyl-2-thiouridine; 5-methylaminomethyl-2-selenouridine; 5-methylaminomethyl-2-thiouridine; 5-methylaminomethyluridine; 5-Methyldihydrouridine; 5-Oxyacetic acid-Uridine TP; 5-Oxyacetic acid-methyl ester-Uridine TP; N1-methyl-pseudo-uracil; N1-ethyl-pseudo-uracil; uridine 5-oxyacetic acid; uridine 5-oxyacetic acid methyl ester; 3-(3-Amino-3-carboxypropyl)-Uridine TP; 5-(iso-Pentenylaminomethyl)-2-thiouridine TP; 5-(iso-Pentenylaminomethyl)-2′-O-methyluridine TP; 5-(iso-Pentenylaminomethyl)uridine TP; 5-propynyl uracil; α-thio-uridine; 1 (aminoalkylamino-carbonylethylenyl)-2(thio)-pseudouracil; 1 (aminoalkylaminocarbonylethylenyl)-2,4-(dithio)pseudouracil; 1 (aminoalkylaminocarbonylethylenyl)-4 (thio)pseudouracil; 1 (aminoalkylaminocarbonylethylenyl)-pseudouracil; 1 (aminocarbonylethylenyl)-2(thio)-pseudouracil; 1 (aminocarbonylethylenyl)-2,4-(dithio)pseudouracil; 1 (aminocarbonylethylenyl)-4 (thio)pseudouracil; 1 (aminocarbonylethylenyl)-pseudouracil; 1 substituted 2(thio)-pseudouracil; 1 substituted 2,4-(dithio)pseudouracil; 1 substituted 4 (thio)pseudouracil; 1 substituted pseudouracil; 1-(aminoalkylamino-carbonylethylenyl)-2-(thio)-pseudouracil; 1-Methyl-3-(3-amino-3-carboxypropyl) pseudouridine TP; 1-Methyl-3-(3-amino-3-carboxypropyl)pseudo-UTP; 1-Methyl-pseudo-UTP; 1-Ethyl-pseudo-UTP; 2 (thio)pseudouracil; 2′ deoxy uridine; 2′ fluorouridine; 2-(thio)uracil; 2,4-(dithio)pseudouracil; 2′ methyl, 2′amino, 2′azido, 2′fluro-guanosine; 2′-Amino-2′-deoxy-UTP; 2′-Azido-2′-deoxy-UTP; 2′-Azido-deoxyuridine TP; 2′-O-methylpseudouridine; 2′ deoxy uridine; 2′ fluorouridine; 2′-Deoxy-2′-a-aminouridine TP; 2′-Deoxy-2′-a-azidouridine TP; 2-methylpseudouridine; 3 (3 amino-3 carboxypropyl)uracil; 4 (thio)pseudouracil; 4-(thio)pseudouracil; 4-(thio)uracil; 4-thiouracil; 5 (1,3-diazole-1-alkyl)uracil; 5 (2-aminopropyl)uracil; 5 (aminoalkyl)uracil; 5 (dimethylaminoalkyl)uracil; 5 (guanidiniumalkyl)uracil; 5 (methoxycarbonylmethyl)-2-(thio)uracil; 5 (methoxycarbonyl-methyl)uracil; 5 (methyl) 2 (thio)uracil; 5 (methyl) 2,4 (dithio)uracil; 5 (methyl) 4 (thio)uracil; 5 (methylaminomethyl)-2 (thio)uracil; 5 (methylaminomethyl)-2,4 (dithio)uracil; 5 (methylaminomethyl)-4 (thio)uracil; 5 (propynyl)uracil; 5 (trifluoromethyl)uracil; 5-(2-aminopropyl)uracil; 5-(alkyl)-2-(thio)pseudouracil; 5-(alkyl)-2,4 (dithio)pseudouracil; 5-(alkyl)-4 (thio)pseudouracil; 5-(alkyl)pseudouracil; 5-(alkyl)uracil; 5-(alkynyl)uracil; 5-(allylamino)uracil; 5-(cyanoalkyl)uracil; 5-(dialkylaminoalkyl)uracil; 5-(dimethylaminoalkyl)uracil; 5-(guanidiniumalkyl)uracil; 5-(halo)uracil; 5-(1,3-diazole-1-alkyl)uracil; 5-(methoxy)uracil; 5-(methoxycarbonylmethyl)-2-(thio)uracil; 5-(methoxycarbonyl-methyl)uracil; 5-(methyl) 2(thio)uracil; 5-(methyl) 2,4 (dithio)uracil; 5-(methyl) 4 (thio)uracil; 5-(methyl)-2-(thio)pseudouracil; 5-(methyl)-2,4 (dithio)pseudouracil; 5-(methyl)-4 (thio)pseudouracil; 5-(methyl)pseudouracil; 5-(methylaminomethyl)-2 (thio)uracil; 5-(methylaminomethyl)-2,4(dithio)uracil; 5-(methylaminomethyl)-4-(thio)uracil; 5-(propynyl)uracil; 5-(trifluoromethyl)uracil; 5-aminoallyl-uridine; 5-bromouridine; 5-iodo-uridine; 5-uracil; 6 (azo)uracil; 6-(azo)uracil; 6-aza-uridine; allyamino-uracil; aza uracil; deaza uracil; N3 (methyl)uracil; P seudo-UTP-1-2-ethanoic acid; Pseudouracil; 4-Thio-pseudo-UTP; 1-carboxymethyl-pseudouridine; 1-methyl-1-deaza-pseudouridine; 1-propynyl-uridine; 1-taurinomethyl-1-methyl-uridine; 1-taurinomethyl-4-thio-uridine; 1-taurinomethyl-pseudouridine; 2-methoxy-4-thio-pseudouridine; 2-thio-1-methyl-1-deaza-pseudouridine; 2-thio-1-methyl-pseudouridine; 2-thio-5-aza-uridine; 2-thio-dihydropseudouridine; 2-thio-dihydrouridine; 2-thio-pseudouridine; 4-methoxy-2-thio-pseudouridine; 4-methoxy-pseudouridine; 4-thio-1-methyl-pseudouridine; 4-thio-pseudouridine; 5-aza-uridine; Dihydropseudouridine; (±)1-(2-Hydroxypropyl)pseudouridine TP; (2R)-1-(2-Hydroxypropyl)pseudouridine TP; (2S)-1-(2-Hydroxypropyl)pseudouridine TP; (E)-5-(2-Bromo-vinyl)ara-uridine TP; (E)-5-(2-Bromo-vinyl)uridine TP; (Z)-5-(2-Bromo-vinyl)ara-uridine TP; (Z)-5-(2-Bromo-vinyl)uridine TP; 1-(2,2,2-Trifluoroethyl)-pseudo-UTP; 1-(2,2,3,3,3-Pentafluoropropyl)pseudouridine TP; 1-(2,2-Diethoxyethyl)pseudouridine TP; 1-(2,4,6-Trimethylbenzyl)pseudouridine TP; 1-(2,4,6-Trimethyl-benzyl)pseudo-UTP; 1-(2,4,6-Trimethyl-phenyl)pseudo-UTP; 1-(2-Amino-2-carboxyethyl)pseudo-UTP; 1-(2-Amino-ethyl)pseudo-UTP; 1-(2-Hydroxyethyl)pseudouridine TP; 1-(2-Methoxyethyl)pseudouridine TP; 1-(3,4-Bis-trifluoromethoxybenzyl)pseudouridine TP; 1-(3,4-Dimethoxybenzyl)pseudouridine TP; 1-(3-Amino-3-carboxypropyl)pseudo-UTP; 1-(3-Amino-propyl)pseudo-UTP; 1-(3-Cyclopropyl-prop-2-ynyl)pseudouridine TP; 1-(4-Amino-4-carboxybutyl)pseudo-UTP; 1-(4-Amino-benzyl)pseudo-UTP; 1-(4-Amino-butyl)pseudo-UTP; 1-(4-Amino-phenyl)pseudo-UTP; 1-(4-Azidobenzyl)pseudouridine TP; 1-(4-Bromobenzyl)pseudouridine TP; 1-(4-Chlorobenzyl)pseudouridine TP; 1-(4-Fluorobenzyl)pseudouridine TP; 1-(4-Iodobenzyl)pseudouridine TP; 1-(4-Methanesulfonylbenzyl)pseudouridine TP; 1-(4-Methoxybenzyl)pseudouridine TP; 1-(4-Methoxy-benzyl)pseudo-UTP; 1-(4-Methoxy-phenyl)pseudo-UTP; 1-(4-Methylbenzyl)pseudouridine TP; 1-(4-Methyl-benzyl)pseudo-UTP; 1-(4-Nitrobenzyl)pseudouridine TP; 1-(4-Nitro-benzyl)pseudo-UTP; 1(4-Nitro-phenyl)pseudo-UTP; 1-(4-Thiomethoxybenzyl)pseudouridine TP; 1-(4-Trifluoromethoxybenzyl)pseudouridine TP; 1-(4-Trifluoromethylbenzyl)pseudouridine TP; 1-(5-Amino-pentyl)pseudo-UTP; 1-(6-Amino-hexyl)pseudo-UTP; 1,6-Dimethyl-pseudo-UTP; 1-[3-(2-{2-[2-(2-Aminoethoxy)-ethoxy]-ethoxy}-ethoxy)-propionyl]pseudouridine TP; 1-{3-[2-(2-Aminoethoxy)-ethoxy]-propionyl} pseudouridine TP; 1-Acetylpseudouridine TP; 1-Alkyl-6-(1-propynyl)-pseudo-UTP; 1-Alkyl-6-(2-propynyl)-pseudo-UTP; 1-Alkyl-6-allyl-pseudo-UTP; 1-Alkyl-6-ethynyl-pseudo-UTP; 1-Alkyl-6-homoallyl-pseudo-UTP; 1-Alkyl-6-vinyl-pseudo-UTP; 1-Allylpseudouridine TP; 1-Aminomethyl-pseudo-UTP; 1-Benzoylpseudouridine TP; 1-Benzyloxymethylpseudouridine TP; 1-Benzyl-pseudo-UTP; 1-Biotinyl-PEG2-pseudouridine TP; 1-Biotinylpseudouridine TP; 1-Butyl-pseudo-UTP; 1-Cyanomethylpseudouridine TP; 1-Cyclobutylmethyl-pseudo-UTP; 1-Cyclobutyl-pseudo-UTP; 1-Cycloheptylmethyl-pseudo-UTP; 1-Cycloheptyl-pseudo-UTP; 1-Cyclohexylmethyl-pseudo-UTP; 1-Cyclohexyl-pseudo-UTP; 1-Cyclooctylmethyl-pseudo-UTP; 1-Cyclooctyl-pseudo-UTP; 1-Cyclopentylmethyl-pseudo-UTP; 1-Cyclopentyl-pseudo-UTP; 1-Cyclopropylmethyl-pseudo-UTP; 1-Cyclopropyl-pseudo-UTP; 1-Ethyl-pseudo-UTP; 1-Hexyl-pseudo-UTP; 1-Homoallylpseudouridine TP; 1-Hydroxymethylpseudouridine TP; 1-iso-propyl-pseudo-UTP; 1-Me-2-thio-pseudo-UTP; 1-Me-4-thio-pseudo-UTP; 1-Me-alpha-thio-pseudo-UTP; 1-Methanesulfonylmethylpseudouridine TP; 1-Methoxymethylpseudouridine TP; 1-Methyl-6-(2,2,2-Trifluoroethyl)pseudo-UTP; 1-Methyl-6-(4-morpholino)-pseudo-UTP; 1-Methyl-6-(4-thiomorpholino)-pseudo-UTP; 1-Methyl-6-(substituted phenyl)pseudo-UTP; 1-Methyl-6-amino-pseudo-UTP; 1-Methyl-6-azido-pseudo-UTP; 1-Methyl-6-bromo-pseudo-UTP; 1-Methyl-6-butyl-pseudo-UTP; 1-Methyl-6-chloro-pseudo-UTP; 1-Methyl-6-cyano-pseudo-UTP; 1-Methyl-6-dimethylamino-pseudo-UTP; 1-Methyl-6-ethoxy-pseudo-UTP; 1-Methyl-6-ethylcarboxylate-pseudo-UTP; 1-Methyl-6-ethyl-pseudo-UTP; 1-Methyl-6-fluoro-pseudo-UTP; 1-Methyl-6-formyl-pseudo-UTP; 1-Methyl-6-hydroxyamino-pseudo-UTP; 1-Methyl-6-hydroxy-pseudo-UTP; 1-Methyl-6-iodo-pseudo-UTP; 1-Methyl-6-iso-propyl-pseudo-UTP; 1-Methyl-6-methoxy-pseudo-UTP; 1-Methyl-6-methylamino-pseudo-UTP; 1-Methyl-6-phenyl-pseudo-UTP; 1-Methyl-6-propyl-pseudo-UTP; 1-Methyl-6-tert-butyl-pseudo-UTP; 1-Methyl-6-trifluoromethoxy-pseudo-UTP; 1-Methyl-6-trifluoromethyl-pseudo-UTP; 1-Morpholinomethylpseudouridine TP; 1-Pentyl-pseudo-UTP; 1-Phenyl-pseudo-UTP; 1-Pivaloylpseudouridine TP; 1-Propargylpseudouridine TP; 1-Propyl-pseudo-UTP; 1-propynyl-pseudouridine; 1-p-tolyl-pseudo-UTP; 1-tert-Butyl-pseudo-UTP; 1-Thiomethoxymethylpseudouridine TP; 1-Thiomorpholinomethylpseudouridine TP; 1-Trifluoroacetylpseudouridine TP; 1-Trifluoromethyl-pseudo-UTP; 1-Vinylpseudouridine TP; 2,2′-anhydro-uridine TP; 2′-bromo-deoxyuridine TP; 2′-F-5-Methyl-2′-deoxy-UTP; 2′-OMe-5-Me-UTP; 2′-OMe-pseudo-UTP; 2′-a-Ethynyluridine TP; 2′-a-Trifluoromethyluridine TP; 2′-b-Ethynyluridine TP; 2′-b-Trifluoromethyluridine TP; 2′-Deoxy-2′,2′-difluorouridine TP; 2′-Deoxy-2′-a-mercaptouridine TP; 2′-Deoxy-2′-α-thiomethoxyuridine TP; 2′-Deoxy-2′-b-aminouridine TP; 2′-Deoxy-2′-b-azidouridine TP; 2′-Deoxy-2′-b-bromouridine TP; 2′-Deoxy-2′-b-chlorouridine TP; 2′-Deoxy-2′-b-fluorouridine TP; 2′-Deoxy-2′-b-iodouridine TP; 2′-Deoxy-2′-b-mercaptouridine TP; 2′-Deoxy-2′-b-thiomethoxyuridine TP; 2-methoxy-4-thio-uridine; 2-methoxyuridine; 2′-O-Methyl-5-(1-propynyl)uridine TP; 3-Alkyl-pseudo-UTP; 4′-Azidouridine TP; 4′-Carbocyclic uridine TP; 4′-Ethynyluridine TP; 5-(1-Propynyl)ara-uridine TP; 5-(2-Furanyl)uridine TP; 5-Cyanouridine TP; 5-Dimethylaminouridine TP; 5′-Homo-uridine TP; 5-iodo-2′-fluoro-deoxyuridine TP; 5-Phenylethynyluridine TP; 5-Trideuteromethyl-6-deuterouridine TP; 5-Trifluoromethyl-Uridine TP; 5-Vinylarauridine TP; 6-(2,2,2-Trifluoroethyl)-pseudo-UTP; 6-(4-Morpholino)-pseudo-UTP; 6-(4-Thiomorpholino)-pseudo-UTP; 6-(Substituted-Phenyl)-pseudo-UTP; 6-Amino-pseudo-UTP; 6-Azido-pseudo-UTP; 6-Bromo-pseudo-UTP; 6-Butyl-pseudo-UTP; 6-Chloro-pseudo-UTP; 6-Cyano-pseudo-UTP; 6-Dimethylamino-pseudo-UTP; 6-Ethoxy-pseudo-UTP; 6-Ethylcarboxylate-pseudo-UTP; 6-Ethyl-pseudo-UTP; 6-Fluoro-pseudo-UTP; 6-Formyl-pseudo-UTP; 6-Hydroxyamino-pseudo-UTP; 6-Hydroxy-pseudo-UTP; 6-Iodo-pseudo-UTP; 6-iso-Propyl-pseudo-UTP; 6-Methoxy-pseudo-UTP; 6-Methylamino-pseudo-UTP; 6-Methyl-pseudo-UTP; 6-Phenyl-pseudo-UTP; 6-Phenyl-pseudo-UTP; 6-Propyl-pseudo-UTP; 6-tert-Butyl-pseudo-UTP; 6-Trifluoromethoxy-pseudo-UTP; 6-Trifluoromethyl-pseudo-UTP; Alpha-thio-pseudo-UTP; Pseudouridine 1-(4-methylbenzenesulfonic acid) TP; Pseudouridine 1-(4-methylbenzoic acid) TP; Pseudouridine TP 1-[3-(2-ethoxy)]propionic acid; Pseudouridine TP 1-[3-{2-(2-[2-(2-ethoxy)-ethoxy]-ethoxy)-ethoxy}]propionic acid; Pseudouridine TP 1-[3-{2-(2-[2-{2(2-ethoxy)-ethoxy}-ethoxy]-ethoxy)-ethoxy}]propionic acid; Pseudouridine TP 1-[3-{2-(2-[2-ethoxy]-ethoxy)-ethoxy}]propionic acid; Pseudouridine TP 1-[3-{2-(2-ethoxy)-ethoxy}] propionic acid; Pseudouridine TP 1-methylphosphonic acid; Pseudouridine TP 1-methylphosphonic acid diethyl ester; Pseudo-UTP-N1-3-propionic acid; Pseudo-UTP-N1-4-butanoic acid; Pseudo-UTP-N1-5-pentanoic acid; Pseudo-UTP-N1-6-hexanoic acid; Pseudo-UTP-N1-7-heptanoic acid; Pseudo-UTP-N1-methyl-p-benzoic acid; Pseudo-UTP-N1-p-benzoic acid; Wybutosine; Hydroxywybutosine; Isowyosine; Peroxywybutosine; undermodified hydroxywybutosine; 4-demethylwyosine; 2,6-(diamino)purine;1-(aza)-2-(thio)-3-(aza)-phenoxazin-1-yl: 1,3-(diaza)-2-(oxo)-phenthiazin-1-yl;1,3-(diaza)-2-(oxo)-phenoxazin-1-yl;1,3,5-(triaza)-2,6-(dioxa)-naphthalene;2 (amino)purine;2,4,5-(trimethyl)phenyl;2′ methyl, 2′amino, 2′azido, 2′fluro-cytidine;2′ methyl, 2′amino, 2′azido, 2′fluro-adenine;2′methyl, 2′amino, 2′azido, 2′fluro-uridine;2′-amino-2′-deoxyribose; 2-amino-6-Chloro-purine; 2-aza-inosinyl; 2′-azido-2′-deoxyribose; 2′fluoro-2′-deoxyribose; 2′-fluoro-modified bases; 2′-O-methyl-ribose; 2-oxo-7-aminopyridopyrimidin-3-yl; 2-oxo-pyridopyrimidine-3-yl; 2-pyridinone; 3 nitropyrrole; 3-(methyl)-7-(propynyl)isocarbostyrilyl; 3-(methyl)isocarbostyrilyl; 4-(fluoro)-6-(methyl)benzimidazole; 4-(methyl)benzimidazole; 4-(methyl)indolyl; 4,6-(dimethyl)indolyl; 5 nitroindole; 5 substituted pyrimidines; 5-(methyl)isocarbostyrilyl; 5-nitroindole; 6-(aza)pyrimidine; 6-(azo)thymine; 6-(methyl)-7-(aza)indolyl; 6-chloro-purine; 6-phenyl-pyrrolo-pyrimidin-2-on-3-yl; 7-(aminoalkylhydroxy)-1-(aza)-2-(thio)-3-(aza)-phenthiazin-1-yl; 7-(aminoalkylhydroxy)-1-(aza)-2-(thio)-3-(aza)-phenoxazin-1-yl; 7-(aminoalkylhydroxy)-1,3-(diaza)-2-(oxo)-phenoxazin-1-yl; 7-(aminoalkylhydroxy)-1,3-(diaza)-2-(oxo)-phenthiazin-1-yl; 7-(aminoalkylhydroxy)-1,3-(diaza)-2-(oxo)-phenoxazin-1-yl; 7-(aza)indolyl; 7-(guanidiniumalkylhydroxy)-1-(aza)-2-(thio)-3-(aza)-phenoxazinl-yl; 7-(guanidiniumalkylhydroxy)-1-(aza)-2-(thio)-3-(aza)-phenthiazin-1-yl; 7-(guanidiniumalkylhydroxy)-1-(aza)-2-(thio)-3-(aza)-phenoxazin-1-yl; 7-(guanidiniumalkylhydroxy)-1,3-(diaza)-2-(oxo)-phenoxazin-1-yl; 7-(guanidiniumalkyl-hydroxy)-1,3-(diaza)-2-(oxo)-phenthiazin-1-yl; 7-(guanidiniumalkylhydroxy)-1,3-(diaza)-2-(oxo)-phenoxazin-1-yl; 7-(propynyl)isocarbostyrilyl; 7-(propynyl)isocarbostyrilyl, propynyl-7-(aza)indolyl; 7-deaza-inosinyl; 7-substituted 1-(aza)-2-(thio)-3-(aza)-phenoxazin-1-yl; 7-substituted 1,3-(diaza)-2-(oxo)-phenoxazin-1-yl; 9-(methyl)-imidizopyridinyl; Aminoindolyl; Anthracenyl; bis-ortho-(aminoalkylhydroxy)-6-phenyl-pyrrolo-pyrimidin-2-on-3-yl; bis-ortho-substituted-6-phenyl-pyrrolo-pyrimidin-2-on-3-yl; Difluorotolyl; Hypoxanthine; Imidizopyridinyl; Inosinyl; Isocarbostyrilyl; Isoguanisine; N2-substituted purines; N6-methyl-2-amino-purine; N6-substituted purines; N-alkylated derivative; Napthalenyl; Nitrobenzimidazolyl; Nitroimidazolyl; Nitroindazolyl; Nitropyrazolyl; Nubularine; 06-substituted purines; O-alkylated derivative; ortho-(aminoalkylhydroxy)-6-phenyl-pyrrolo-pyrimidin-2-on-3-yl; ortho-substituted-6-phenyl-pyrrolo-pyrimidin-2-on-3-yl; Oxoformycin TP; para-(aminoalkylhydroxy)-6-phenyl-pyrrolo-pyrimidin-2-on-3-yl; para-substituted-6-phenyl-pyrrolo-pyrimidin-2-on-3-yl; Pentacenyl; Phenanthracenyl; Phenyl; propynyl-7-(aza)indolyl; Pyrenyl; pyridopyrimidin-3-yl; pyridopyrimidin-3-yl, 2-oxo-7-amino-pyridopyrimidin-3-yl; pyrrolo-pyrimidin-2-on-3-yl; Pyrrolopyrimidinyl; Pyrrolopyrizinyl; Stilbenzyl; substituted 1,2,4-triazoles; Tetracenyl; Tubercidine; Xanthine; Xanthosine-5′-TP; 2-thio-zebularine; 5-aza-2-thio-zebularine; 7-deaza-2-amino-purine; pyridin-4-one ribonucleoside; 2-Amino-riboside-TP; Formycin A TP; Formycin B TP; Pyrrolosine TP; 2′-OH-ara-adenosine TP; 2′-OH-ara-cytidine TP; 2′-OH-ara-uridine TP; 2′-OH-ara-guanosine TP; 5-(2-carbomethoxyvinyl)uridine TP; and N6-(19-Amino-pentaoxanonadecyl)adenosine TP.

[0467] In some embodiments, the polynucleotide (e.g., RNA polynucleotide, such as mRNA polynucleotide) includes a combination of at least two (e.g., 2, 3, 4 or more) of the aforementioned modified nucleobases.

[0468] In some embodiments, the mRNA comprises at least one chemically modified nucleoside. In some embodiments, the at least one chemically modified nucleoside is selected from the group consisting of pseudouridine (ψ), 2-thiouridine (s2U), 4′-thiouridine, 5-methylcytosine, 2-thio-1-methyl-1-deaza-pseudouridine, 2-thio-1-methyl-pseudouridine, 2-thio-5-aza-uridine, 2-thio-dihydropseudouridine, 2-thio-dihydrouridine, 2-thio-pseudouridine, 4-methoxy-2-thio-pseudouridine, 4-methoxy-pseudouridine, 4-thio-1-methyl-pseudouridine, 4-thio-pseudouridine, 5-aza-uridine, dihydropseudouridine, 5-methyluridine, 5-methoxyuridine, 2′-O-methyl uridine, 1-methyl-pseudouridine (m1ψ), 1-ethyl-pseudouridine (e1ψ), 5-methoxy-uridine (mo5U), 5-methyl-cytidine (m5C), α-thio-guanosine, α-thio-adenosine, 5-cyano uridine, 4′-thio uridine 7-deaza-adenine, 1-methyl-adenosine (m1A), 2-methyl-adenine (m2A), N6-methyl-adenosine (m6A), and 2,6-Diaminopurine, (I), 1-methyl-inosine (m1I), wyosine (imG), methylwyosine (mimG), 7-deaza-guanosine, 7-cyano-7-deaza-guanosine (preQ0), 7-aminomethyl-7-deaza-guanosine (preQ1), 7-methyl-guanosine (m7G), 1-methyl-guanosine (m1G), 8-oxo-guanosine, 7-methyl-8-oxo-guanosine, 2,8-dimethyladenosine, 2-geranylthiouridine, 2-lysidine, 2-selenouridine, 3-(3-amino-3-carboxypropyl)-5,6-dihydrouridine, 3-(3-amino-3-carboxypropyl)pseudouridine, 3-methylpseudouridine, 5-(carboxyhydroxymethyl)-2′-O-methyluridine methyl ester, 5-aminomethyl-2-geranylthiouridine, 5-aminomethyl-2-selenouridine, 5-aminomethyluridine, 5-carbamoylhydroxymethyluridine, 5-carbamoylmethyl-2-thiouridine, 5-carboxymethyl-2-thiouridine, 5-carboxymethylaminomethyl-2-geranylthiouridine, 5-carboxymethylaminomethyl-2-selenouridine, 5-cyanomethyluridine, 5-hydroxycytidine, 5-methylaminomethyl-2-geranylthiouridine, 7-aminocarboxypropyl-demethylwyosine, 7-aminocarboxypropylwyosine, 7-aminocarboxypropylwyosine methyl ester, 8-methyladenosine, N4,N4-dimethylcytidine, N6-formyladenosine, N6-hydroxymethyladenosine, agmatidine, cyclic N6-threonylcarbamoyladenosine, glutamyl-queuosine, methylated undermodified hydroxywybutosine, N4,N4,2′-O-trimethylcytidine, geranylated 5-methylaminomethyl-2-thiouridine, geranylated 5-carboxymethylaminomethyl-2-thiouridine, Qbase, preQ0base, preQ1base, and two or more combinations thereof. In some embodiments, the at least one chemically modified nucleoside is selected from the group consisting of pseudouridine, 1-methyl-pseudouridine, 1-ethyl-pseudouridine, 5-methylcytosine, 5-methoxyuridine, and a combination thereof. In some embodiments, the polynucleotide (e.g., RNA polynucleotide, such as mRNA polynucleotide) includes a combination of at least two (e.g., 2, 3, 4 or more) of the aforementioned modified nucleobases.

### (i) Base Modifications

[0469] In certain embodiments, the chemical modification is at nucleobases in the polynucleotides (e.g., RNA polynucleotide, such as mRNA polynucleotide). In some embodiments, modified nucleobases in the polynucleotide (e.g., RNA polynucleotide, such as mRNA polynucleotide) are selected from the group consisting of 1-methyl-pseudouridine (m1ψ), 1-ethyl-pseudouridine (e1ψ), 5-methoxy-uridine (mo5U), 5-methyl-cytidine (m5C), pseudouridine (ψ), α-thio-guanosine and α-thio-adenosine. In some embodiments, the polynucleotide includes a combination of at least two (e.g., 2, 3, 4 or more) of the aforementioned modified nucleobases.

[0470] In some embodiments, the polynucleotide (e.g., RNA polynucleotide, such as mRNA polynucleotide) comprises pseudouridine (ψ) and 5-methyl-cytidine (m5C). In some embodiments, the polynucleotide (e.g., RNA polynucleotide, such as mRNA polynucleotide) comprises 1-methyl-pseudouridine (m1ψ). In some embodiments, the polynucleotide (e.g., RNA polynucleotide, such as mRNA polynucleotide) comprises 1-ethyl-pseudouridine (e1ψ). In some embodiments, the polynucleotide (e.g., RNA polynucleotide, such as mRNA polynucleotide) comprises 1-methyl-pseudouridine (m1ψ) and 5-methyl-cytidine (m5C). In some embodiments, the polynucleotide (e.g., RNA polynucleotide, such as mRNA polynucleotide) comprises 1-ethyl-pseudouridine (e1ψ) and 5-methyl-cytidine (m5C). In some embodiments, the polynucleotide (e.g., RNA polynucleotide, such as mRNA polynucleotide) comprises 2-thiouridine (s2U). In some embodiments, the polynucleotide (e.g., RNA polynucleotide, such as mRNA polynucleotide) comprises 2-thiouridine and 5-methyl-cytidine (m5C). In some embodiments, the polynucleotide (e.g., RNA polynucleotide, such as mRNA polynucleotide) comprises methoxy-uridine (mo5U). In some embodiments, the polynucleotide (e.g., RNA polynucleotide, such as mRNA polynucleotide) comprises 5-methoxy-uridine (mo5U) and 5-methyl-cytidine (m5C). In some embodiments, the polynucleotide (e.g., RNA polynucleotide, such as mRNA polynucleotide) comprises 2′-O-methyl uridine. In some embodiments, the polynucleotide (e.g., RNA polynucleotide, such as mRNA polynucleotide) comprises 2′-O-methyl uridine and 5-methyl-cytidine (m5C). In some embodiments, the polynucleotide (e.g., RNA polynucleotide, such as mRNA polynucleotide) comprises N6-methyl-adenosine (m6A). In some embodiments, the polynucleotide (e.g., RNA polynucleotide, such as mRNA polynucleotide) comprises N6-methyl-adenosine (m6A) and 5-methyl-cytidine (m5C).

[0471] In some embodiments, the polynucleotide (e.g., RNA polynucleotide, such as mRNA polynucleotide) is uniformly modified (e.g., fully modified, modified throughout the entire sequence) for a particular modification. For example, a polynucleotide can be uniformly modified with 5-methyl-cytidine (m5C), meaning that all cytosine residues in the mRNA sequence are replaced with 5-methyl-cytidine (m5C). Similarly, a polynucleotide can be uniformly modified for any type of nucleoside residue present in the sequence by replacement with a modified residue such as any of those set forth above. In some embodiments, the chemically modified nucleosides in the open reading frame are selected from the group consisting of uridine, adenine, cytosine, guanine, and any combination thereof.

[0472] In some embodiments, the modified nucleobase is a modified cytosine. Examples of nucleobases and nucleosides having a modified cytosine include N4-acetyl-cytidine (ac4C), 5-methyl-cytidine (m5C), 5-halo-cytidine (e.g., 5-iodo-cytidine), 5-hydroxymethyl-cytidine (hm5C), 1-methyl-pseudoisocytidine, 2-thio-cytidine (s2C), 2-thio-5-methyl-cytidine.

[0473] In some embodiments, a modified nucleobase is a modified uridine. Example nucleobases and nucleosides having a modified uridine include 5-cyano uridine or 4′-thio uridine.

[0474] In some embodiments, a modified nucleobase is a modified adenine. Example nucleobases and nucleosides having a modified adenine include 7-deaza-adenine, 1-methyl-adenosine (m1A), 2-methyl-adenine (m2A), N6-methyl-adenine (m6A), and 2,6-Diaminopurine.

[0475] In some embodiments, a modified nucleobase is a modified guanine. Example nucleobases and nucleosides having a modified guanine include inosine (I), 1-methyl-inosine (m1I), wyosine (imG), methylwyosine (mimG), 7-deaza-guanosine, 7-cyano-7-deaza-guanosine (preQ0), 7-aminomethyl-7-deaza-guanosine (preQ1), 7-methyl-guanosine (m7G), 1-methyl-guanosine (m1G), 8-oxo-guanosine, 7-methyl-8-oxo-guanosine.

[0476] In some embodiments, the nucleobase modified nucleotides in the polynucleotide (e.g., RNA polynucleotide, such as mRNA polynucleotide) are 5-methoxyuridine.

[0477] In some embodiments, the polynucleotide (e.g., RNA polynucleotide, such as mRNA polynucleotide) includes a combination of at least two (e.g., 2, 3, 4 or more) of modified nucleobases.

[0478] In some embodiments, at least 95% of a type of nucleobases (e.g., uracil) in a polynucleotide of the invention (e.g., an mRNA polynucleotide encoding BH3) are modified nucleobases. In some embodiments, at least 95% of uracil in a polynucleotide of the present invention (e.g., an mRNA polynucleotide encoding BH3) is 5-methoxyuracil.

[0479] In some embodiments, the polynucleotide (e.g., RNA polynucleotide, such as mRNA polynucleotide) comprises 5-methoxyuridine (5mo5U) and 5-methyl-cytidine (m5C).

[0480] In some embodiments, the polynucleotide (e.g., RNA polynucleotide, such as mRNA polynucleotide) is uniformly modified (e.g., fully modified, modified throughout the entire sequence) for a particular modification. For example, a polynucleotide can be uniformly modified with 5-methoxyuridine, meaning that substantially all uridine residues in the mRNA sequence are replaced with 5-methoxyuridine. Similarly, a polynucleotide can be uniformly modified for any type of nucleoside residue present in the sequence by replacement with a modified residue such as any of those set forth above.

[0481] In some embodiments, the modified nucleobase is a modified cytosine.

[0482] In some embodiments, a modified nucleobase is a modified uracil. Example nucleobases and nucleosides having a modified uracil include 5-methoxyuracil.

[0483] In some embodiments, a modified nucleobase is a modified adenine.

[0484] In some embodiments, a modified nucleobase is a modified guanine.

[0485] In some embodiments, the nucleobases, sugar, backbone, or any combination thereof in the open reading frame encoding a polypeptide (e.g., BH3) are chemically modified by at least 10%, at least 20%, at least 30%, at least 40%, at least 50%, at least 60%, at least 70%, at least 80%, at least 90%, at least 95%, at least 99%, or 100%.

[0486] In some embodiments, the uridine nucleosides in the open reading frame encoding a polypeptide (e.g., BH3) are chemically modified by at least 10%, at least 20%, at least 30%, at least 40%, at least 50%, at least 60%, at least 70%, at least 80%, at least 90%, at least 95%, at least 99%, or 100%.

[0487] In some embodiments, the adenosine nucleosides in the open reading frame encoding a polypeptide (e.g., BH3) are chemically modified by at least 10%, at least 20%, at least 30%, at least 40%, at least 50%, at least 60%, at least 70%, at least 80%, at least 90%, at least 95%, at least 99%, or 100%.

[0488] In some embodiments, the cytidine nucleosides in the open reading frame encoding a polypeptide (e.g., BH3) are chemically modified by at least at least 10%, at least 20%, at least 30%, at least 40%, at least 50%, at least 60%, at least 70%, at least 80%, at least 90%, at least 95%, at least 99%, or 100%.

[0489] In some embodiments, the guanosine nucleosides in the open reading frame encoding a polypeptide (e.g., BH3) are chemically modified by at least at least 10%, at least 20%, at least 30%, at least 40%, at least 50%, at least 60%, at least 70%, at least 80%, at least 90%, at least 95%, at least 99%, or 100%.

[0490] In some embodiments, the polynucleotides can include any useful linker between the nucleosides. Such linkers, including backbone modifications, that are useful in the composition of the present disclosure include, but are not limited to the following: 3′-alkylene phosphonates, 3′-amino phosphoramidate, alkene containing backbones, aminoalkylphosphoramidates, aminoalkylphosphotriesters, boranophosphates, —CH₂—O—N(CH₃)—CH₂—, —CH₂—N(CH₃)—N(CH₃)—CH₂—, —CH₂—NH—CH₂—, chiral phosphonates, chiral phosphorothioates, formacetyl and thioformacetyl backbones, methylene (methylimino), methylene formacetyl and thioformacetyl backbones, methyleneimino and methylenehydrazino backbones, morpholino linkages, —N(CH₃)—CH₂—CH₂—, oligonucleosides with heteroatom internucleoside linkage, phosphinates, phosphoramidates, phosphorodithioates, phosphorothioate internucleoside linkages, phosphorothioates, phosphotriesters, PNA, siloxane backbones, sulfamate backbones, sulfide sulfoxide and sulfone backbones, sulfonate and sulfonamide backbones, thionoalkylphosphonates, thionoalkylphosphotriesters, and thionophosphoramidates.

### Untranslated Regions (UTRs)

[0491] Untranslated regions (UTRs) are nucleic acid sections of a polynucleotide before a start codon (5′UTR) and after a stop codon (3′UTR) that are not translated. In some embodiments, a polynucleotide (e.g., a ribonucleic acid (RNA), e.g., a messenger RNA (mRNA)) of the invention comprising an open reading frame (ORF) encoding a polypeptide (e.g., BH3) further comprises UTR (e.g., a 5′UTR or functional fragment thereof, a 3′UTR or functional fragment thereof, or a combination thereof).

[0492] A UTR can be homologous or heterologous to the coding region in a polynucleotide. In some embodiments, the UTR is homologous to the ORF encoding the polypeptide (e.g., BH3). In some embodiments, the UTR is heterologous to the ORF encoding the polypeptide (e.g., BH3). In some embodiments, the polynucleotide comprises two or more 5′UTRs or functional fragments thereof, each of which have the same or different nucleotide sequences. In some embodiments, the polynucleotide comprises two or more 3′UTRs or functional fragments thereof, each of which have the same or different nucleotide sequences.

[0493] In some embodiments, the 5′UTR or functional fragment thereof, 3′ UTR or functional fragment thereof, or any combination thereof is sequence optimized.

[0494] In some embodiments, the 5′UTR or functional fragment thereof, 3′ UTR or functional fragment thereof, or any combination thereof comprises at least one chemically modified nucleobase, e.g., 5-methoxyuracil.

[0495] UTRs can have features that provide a regulatory role, e.g., increased or decreased stability, localization and/or translation efficiency. A polynucleotide comprising a UTR can be administered to a cell, tissue, or organism, and one or more regulatory features can be measured using routine methods. In some embodiments, a functional fragment of a 5′UTR or 3′UTR comprises one or more regulatory features of a full length 5′ or 3′ UTR, respectively.

[0496] Natural 5′UTRs bear features that play roles in translation initiation. They harbor signatures like Kozak sequences that are commonly known to be involved in the process by which the ribosome initiates translation of many genes. Kozak sequences have the consensus CCR(A/G)CCAUGG, where R is a purine (adenine or guanine) three bases upstream of the start codon (AUG), which is followed by another ‘G’. 5′UTRs also have been known to form secondary structures that are involved in elongation factor binding.

[0497] By engineering the features typically found in abundantly expressed genes of specific target organs, one can enhance the stability and protein production of a polynucleotide. For example, introduction of 5′UTR of liver-expressed mRNA, such as albumin, serum amyloid A, Apolipoprotein A/B/E, transferrin, alpha fetoprotein, erythropoietin, or Factor VIII, can enhance expression of polynucleotides in hepatic cell lines or liver. Likewise, use of 5′UTR from other tissue-specific mRNA to improve expression in that tissue is possible for muscle (e.g., MyoD, Myosin, Myoglobin, Myogenin, Herculin), for endothelial cells (e.g., Tie-1, CD36), for myeloid cells (e.g., C/EBP, AML1, G-CSF, GM-CSF, CD11b, MSR, Fr-1, i-NOS), for leukocytes (e.g., CD45, CD18), for adipose tissue (e.g., CD36, GLUT4, ACRP30, adiponectin) and for lung epithelial cells (e.g., SP-A/B/C/D).

[0498] In some embodiments, UTRs are selected from a family of transcripts whose proteins share a common function, structure, feature or property. For example, an encoded polypeptide can belong to a family of proteins (i.e., that share at least one function, structure, feature, localization, origin, or expression pattern), which are expressed in a particular cell, tissue or at some time during development. The UTRs from any of the genes or mRNA can be swapped for any other UTR of the same or different family of proteins to create a new polynucleotide.

[0499] In some embodiments, the 5′UTR and the 3′UTR can be heterologous. In some embodiments, the 5′UTR can be derived from a different species than the 3′UTR. In some embodiments, the 3′UTR can be derived from a different species than the 5′UTR. Co-owned International Patent Application No. PCT/US2014/021522 (Publ. No. WO/2014/164253, incorporated herein by reference in its entirety) provides a listing of exemplary UTRs that can be utilized in the polynucleotide of the present invention as flanking regions to an ORF.

[0500] Exemplary UTRs of the application include, but are not limited to, one or more 5′UTR and/or 3′UTR derived from the nucleic acid sequence of: a globin, such as an α- or β-globin (e.g., a Xenopus, mouse, rabbit, or human globin); a strong Kozak translational initiation signal; a CYBA (e.g., human cytochrome b-245 α polypeptide); an albumin (e.g., human albumin7); a HSD17B4 (hydroxysteroid (17-β) dehydrogenase); a virus (e.g., a tobacco etch virus (TEV), a Venezuelan equine encephalitis virus (VEEV), a Dengue virus, a cytomegalovirus (CMV) (e.g., CMV immediate early 1 (IE1)), a hepatitis virus (e.g., hepatitis B virus), a sindbis virus, or a PAV barley yellow dwarf virus); a heat shock protein (e.g., hsp70); a translation initiation factor (e.g., elF4G); a glucose transporter (e.g., hGLUT1 (human glucose transporter 1)); an actin (e.g., human α or β actin); a GAPDH; a tubulin; a histone; a citric acid cycle enzyme; a topoisomerase (e.g., a 5′UTR of a TOP gene lacking the 5′ TOP motif (the oligopyrimidine tract)); a ribosomal protein Large 32 (L32); a ribosomal protein (e.g., human or mouse ribosomal protein, such as, for example, rps9); an ATP synthase (e.g., ATP5A1 or the Rsubunit of mitochondrial H⁺-ATP synthase); a growth hormone e (e.g., bovine (bGH) or human (hGH)); an elongation factor (e.g., elongation factor 1 α1 (EEF1A1)); a manganese superoxide dismutase (MnSOD); a myocyte enhancer factor 2A (MEF2A); a β-F1-ATPase, a creatine kinase, a myoglobin, a granulocyte-colony stimulating factor (G-CSF); a collagen (e.g., collagen type I, alpha 2 (Col1A2), collagen type I, alpha 1 (Col1A1), collagen type VI, alpha 2 (Col6A2), collagen type VI, alpha 1 (Col6A1)); a ribophorin (e.g., ribophorin I (RPNI)); a low density lipoprotein receptor-related protein (e.g., LRP1); a cardiotrophin-like cytokine factor (e.g., Nnt1); calreticulin (Calr); a procollagen-lysine, 2-oxoglutarate 5-dioxygenase 1 (Plod1); and a nucleobindin (e.g., Nucb1).

[0501] Other exemplary 5′ and 3′ UTRs include, but are not limited to, those described in Karikóet al., Mol. Ther. 2008 16(11):1833-1840; Karikó et al., Mol. Ther. 2012 20(5):948-953; Karikó et al., Nucleic Acids Res. 2011 39(21):e142; Strong et al., Gene Therapy 1997 4:624-627; Hansson et al., J. Biol. Chem. 2015 290(9):5661-5672; Yu et al., Vaccine 2007 25(10):1701-1711; Cafri et al., Mol. Ther. 2015 23(8):1391-1400; Andries et al., Mol. Pharm. 2012 9(8):2136-2145; Crowley et al., Gene Ther. 2015 Jun. 30, doi:10.1038/gt.2015.68; Ramunas et al., FASEB J. 2015 29(5):1930-1939; Wang et al., Curr. Gene Ther. 2015 15(4):428-435; Holtkamp et al., Blood 2006 108(13):4009-4017; Kormann et al., Nat. Biotechnol. 201129(2):154-157; Poleganov et al., Hum. Gen. Ther. 2015 26(11):751-766; Warren et al., Cell Stem Cell 2010 7(5):618-630; Mandal and Rossi, Nat. Protoc. 2013 8(3):568-582; Holcik and Liebhaber, PNAS 1997 94(6):2410-2414; Ferizi et al., Lab Chip. 2015 15(17):3561-3571; Thess et al., Mol. Ther. 2015 23(9):1456-1464; Boros et al., PLoS One 2015 10(6):e0131141; Boros et al., J. Photochem. Photobiol. B. 2013 129:93-99; Andries et al., J. Control. Release 2015 217:337-344; Zinckgraf et al., Vaccine 2003 21(15):1640-9; Garneau et al., J. Virol. 2008 82(2):880-892; Holden and Harris, Virology 2004 329(1):119-133; Chiu et al., J. Virol. 2005 79(13):8303-8315; Wang et al., EMBO J. 1997 16(13):4107-4116; Al-Zoghaibi et al., Gene 2007 391(1-2):130-9; Vivinus et al., Eur. J. Biochem. 2001268(7):1908-1917; Gan and Rhoads, J. Biol. Chem. 1996 271(2):623-626; Boado et al., J. Neurochem. 1996 67(4):1335-1343; Knirsch and Clerch, Biochem. Biophys. Res. Commun. 2000 272(1):164-168; Chung et al., Biochemistry 1998 37(46):16298-16306; Izquierdo and Cuevza, Biochem. J. 2000 346 Pt 3:849-855; Dwyer et al., J. Neurochem. 1996 66(2):449-458; Black et al., Mol. Cell. Biol. 1997 17(5):2756-2763; Izquierdo and Cuevza, Mol. Cell. Biol. 1997 17(9):5255-5268; U.S. Pat. Nos. 8,278,036; 8,748,089; 8,835,108; 9,012,219; US2010/0129877; US2011/0065103; US2011/0086904; US2012/0195936; US2014/020675; US2013/0195967; US2014/029490; US2014/0206753; WO2007/036366; WO2011/015347; WO2012/072096; WO2013/143555; WO2014/071963; WO2013/185067; WO2013/182623; WO2014/089486; WO2013/185069; WO2014/144196; WO2014/152659; 2014/152673; WO2014/152940; WO2014/152774; WO2014/153052; WO2014/152966, WO2014/152513; WO2015/101414; WO2015/101415; WO2015/062738; and WO2015/024667; the contents of each of which are incorporated herein by reference in their entirety.

[0502] In some embodiments, the 5′UTR is selected from the group consisting of a 3-globin 5′UTR; a 5′UTR containing a strong Kozak translational initiation signal; a cytochrome b-245 α polypeptide (CYBA) 5′UTR; a hydroxysteroid (17-β) dehydrogenase (HSD17B4) 5′UTR; a Tobacco etch virus (TEV) 5′UTR; a Venezuelen equine encephalitis virus (TEEV) 5′UTR; a 5′ proximal open reading frame of rubella virus (RV) RNA encoding nonstructural proteins; a Dengue virus (DEN) 5′UTR; a heat shock protein 70 (Hsp70) 5′UTR; a eIF4G 5′UTR; a GLUT1 5′UTR; functional fragments thereof and any combination thereof.

[0503] In some embodiments, the 3′UTR is selected from the group consisting of a β-globin 3′UTR; a CYBA 3′UTR; an albumin 3′UTR; a growth hormone (GH) 3′UTR; a VEEV 3′UTR; a hepatitis B virus (HBV) 3′UTR; α-globin 3′UTR; a DEN 3′UTR; a PAV barley yellow dwarf virus (BYDV-PAV) 3′UTR; an elongation factor 1 α1 (EEF1A1) 3′UTR; a manganese superoxide dismutase (MnSOD) 3′UTR; a β subunit of mitochondrial H(+)-ATP synthase (β-mRNA) 3′UTR; a GLUT1 3′UTR; a MEF2A 3′UTR; a β-F1-ATPase 3′UTR; functional fragments thereof and combinations thereof.

[0504] Other exemplary UTRs include, but are not limited to, one or more of the UTRs, including any combination of UTRs, disclosed in WO2014/164253, the contents of which are incorporated herein by reference in their entirety. Shown in Table 21 of U.S. Provisional Application No. 61/775,509 and in Table 22 of U.S. Provisional Application No. 61/829,372, the contents of each are incorporated herein by reference in their entirety, is a listing start and stop sites for 5′UTRs and 3′UTRs. In Table 21, each 5′UTR (5′-UTR-005 to 5′-UTR 68511) is identified by its start and stop site relative to its native or wild-type (homologous) transcript (ENST; the identifier used in the ENSEMBL database).

[0505] Wild-type UTRs derived from any gene or mRNA can be incorporated into the polynucleotides of the invention. In some embodiments, a UTR can be altered relative to a wild type or native UTR to produce a variant UTR, e.g., by changing the orientation or location of the UTR relative to the ORF; or by inclusion of additional nucleotides, deletion of nucleotides, swapping or transposition of nucleotides. In some embodiments, variants of 5′ or 3′ UTRs can be utilized, for example, mutants of wild type UTRs, or variants wherein one or more nucleotides are added to or removed from a terminus of the UTR.

[0506] Additionally, one or more synthetic UTRs can be used in combination with one or more non-synthetic UTRs. See, e.g., Mandal and Rossi, Nat. Protoc. 2013 8(3):568-82, the contents of which are incorporated herein by reference in their entirety, and sequences available at www.addgene.org/Derrick_Rossi/, last accessed Apr. 16, 2016. UTRs or portions thereof can be placed in the same orientation as in the transcript from which they were selected or can be altered in orientation or location. Hence, a 5′ and/or 3′ UTR can be inverted, shortened, lengthened, or combined with one or more other 5′ UTRs or 3′ UTRs.

[0507] In some embodiments, the polynucleotide comprises multiple UTRs, e.g., a double, a triple or a quadruple 5′UTR or 3′UTR. For example, a double UTR comprises two copies of the same UTR either in series or substantially in series. For example, a double beta-globin 3′UTR can be used (see US2010/0129877, the contents of which are incorporated herein by reference in its entirety).

[0508] In certain embodiments, the polynucleotides of the invention comprise a 5′UTR and/or a 3′UTR selected from any of the UTRs disclosed herein. In some embodiments, the 5′UTR comprises:

5′UTR-001 (Upstream UTR)
(SEQ ID NO. 327)
(GGGAAATAAGAGAGAAAAGAAGAGTAAGAAGAAATATAAGAGCCACC);
5′UTR-002 (Upstream UTR)
(SEQ ID NO. 328)
(GGGAGATCAGAGAGAAAAGAAGAGTAAGAAGAAATATAAGAGCCACC);
5′UTR-003 (Upstream UTR)
(SEQ ID NO. 329)
(GGAATAAAAGTCTCAACACAACATATACAAAACAAACGAATCTCAAGCA
ATCAAGCATTCTACTTCTATTGCAGCAATTTAAATCATTTCTTTTAAAGC
AAAAGCAATTTTCTGAAAATTTTCACCATTTACGAACGATAGCAAC);
5′UTR-004 (Upstream UTR)
(SEQ ID NO. 330)
(GGGAGACAAGCUUGGCAUUCCGGUACUGUUGGUAAAGCCACC);
5′UTR-005 (Upstream UTR)
(SEQ ID NO. 331)
(GGGAGATCAGAGAGAAAAGAAGAGTAAGAAGAAATATAAGAGCCACC);
UTR 5′UTR-006 (Upstream UTR)
(SEQ ID NO. 332)
(GGAATAAAAGTCTCAACACAACATATACAAAACAAACGAATCTCAAGCA
ATCAAGCATTCTACTTCTATTGCAGCAATTTAAATCATTTCTTTTAAAGC
AAAAGCAATTTTCTGAAAATTTTCACCATTTACGAACGATAGCAAC);
5′UTR-007 (Upstream UTR)
(SEQ ID NO. 333)
(GGGAGACAAGCUUGGCAUUCCGGUACUGUUGGUAAAGCCACC);
5′UTR-008 (Upstream UTR)
(SEQ ID NO. 334)
(GGGAATTAACAGAGAAAAGAAGAGTAAGAAGAAATATAAGAGCCACC);
5′UTR-009 (Upstream UTR)
(SEQ ID NO. 335)
(GGGAAATTAGACAGAAAAGAAGAGTAAGAAGAAATATAAGAGCCACC);
UTR 5′UTR-010, Upstream
(SEQ ID NO. 336)
(GGGAAATAAGAGAGTAAAGAACAGTAAGAAGAAATATAAGAGCCACC);
5′UTR-011 (Upstream UTR)
(SEQ ID NO. 337)
(GGGAAAAAAGAGAGAAAAGAAGACTAAGAAGAAATATAAGAGCCACC);
5′UTR-012 (Upstream UTR)
(SEQ ID NO. 338)
(GGGAAATAAGAGAGAAAAGAAGAGTAAGAAGATATATAAGAGCCACC);
5′UTR-013 (Upstream UTR)
(SEQ ID NO. 339)
(GGGAAATAAGAGACAAAACAAGAGTAAGAAGAAATATAAGAGCCACC);
5′UTR-014 (Upstream UTR)
(SEQ ID NO. 340)
(GGGAAATTAGAGAGTAAAGAACAGTAAGTAGAATTAAAAGAGCCACC);
5′UTR-15 (Upstream UTR)
(SEQ ID NO. 341)
(GGGAAATAAGAGAGAATAGAAGAGTAAGAAGAAATATAAGAGCCACC);
5′UTR-016 (Upstream UTR)
(SEQ ID NO. 342)
(GGGAAATAAGAGAGAAAAGAAGAGTAAGAAGAAAATTAAGAGCCACC);
5′UTR-017 (Upstream UTR)
(SEQ ID NO. 343)
(GGGAAATAAGAGAGAAAAGAAGAGTAAGAAGAAATTTAAGAGCCACC);
5′UTR-018 (Upstream UTR)
(SEQ ID NO. 344)
(TCAAGCTTTTGGACCCTCGTACAGAAGCTAATACGACTCACTATAGGGA
AATAAGAGAGAAAAGAAGAGTAAGAAGAAATATAAGAGCCACC);
142-3p 5′UTR-001 (Upstream UTR
including miR142-3p)
(SEQ ID NO. 345)
(TGATAATAGTCCATAAAGTAGGAAACACTACAGCTGGAGCCTCGGTGGC
CATGCTTCTTGCCCCTTGGGCCTCCCCCCAGCCCCTCCTCCCCTTCCTGC
ACCCGTACCCCCGTGGTCTTTGAATAAAGTCTGAGTGGGCGGC);
142-3p 5′UTR-002 (Upstream UTR
including miR142-3p)
(SEQ ID NO. 346)
(TGATAATAGGCTGGAGCCTCGGTGGCTCCATAAAGTAGGAAACACTACA
CATGCTTCTTGCCCCTTGGGCCTCCCCCCAGCCCCTCCTCCCCTTCCTGC
ACCCGTACCCCCGTGGTCTTTGAATAAAGTCTGAGTGGGCGGC);
142-3p 5′UTR-003 (Upstream UTR
including miR142-3p)
(SEQ ID NO. 347)
(TGATAATAGGCTGGAGCCTCGGTGGCCATGCTTCTTGCCCCTTCCATAA
AGTAGGAAACACTACATGGGCCTCCCCCCAGCCCCTCCTCCCCTTCCTGC
ACCCGTACCCCCGTGGTCTTTGAATAAAGTCTGAGTGGGCGGC);
142-3p 5′UTR-004 (Upstream UTR
including miR142-3p)
(SEQ ID NO. 348)
(TGATAATAGGCTGGAGCCTCGGTGGCCATGCTTCTTGCCCCTTGGGCCT
CCCCCCAGTCCATAAAGTAGGAAACACTACACCCCTCCTCCCCTTCCTGC
ACCCGTACCCCCGTGGTCTTTGAATAAAGTCTGAGTGGGCGGC);
142-3p 5′UTR-005 (Upstream UTR
including miR142-3p)
(SEQ ID NO. 349)
(TGATAATAGGCTGGAGCCTCGGTGGCCATGCTTCTTGCCCCTTGGGCCT
CCCCCCAGCCCCTCCTCCCCTTCTCCATAAAGTAGGAAACACTACACTGC
ACCCGTACCCCCGTGGTCTTTGAATAAAGTCTGAGTGGGCGGC);
142-3p 5′UTR-006 (Upstream UTR
including miR142-3p)
(SEQ ID NO. 350)
(TGATAATAGGCTGGAGCCTCGGTGGCCATGCTTCTTGCCCCTTGGGCCT
CCCCCCAGCCCCTCCTCCCCTTCCTGCACCCGTACCCCCTCCATAAAGTA
GGAAACACTACAGTGGTCTTTGAATAAAGTCTGAGTGGGCGGC);
or
142-3p 5′UTR-007 (Upstream UTR
including miR142-3p)
(SEQ ID NO. 351)
(TGATAATAGGCTGGAGCCTCGGTGGCCATGCTTCTTGCCCCTTGGGCCT
CCCCCCAGCCCCTCCTCCCCTTCCTGCACCCGTACCCCCGTGGTCTTTGA
ATAAAGTTCCATAAAGTAGGAAACACTACACTGAGTGGGCGGC).

In some embodiments, the 3′UTR comprises:

3′UTR-001 (Creatine Kinase UTR)
(SEQ ID NO. 352)
(GCGCCTGCCCACCTGCCACCGACTGCTGGAACCCAGCCAGTGGGAGGGCCTGGC
CCACCAGAGTCCTGCTCCCTCACTCCTCGCCCCGCCCCCTGTCCCAGAGTCCCAC
CTGGGGGCTCTCTCCACCCTTCTCAGAGTTCCAGTTTCAACCAGAGTTCCAACCA
ATGGGCTCCATCCTCTGGATTCTGGCCAATGAAATATCTCCCTGGCAGGGTCCTC
TTCTTTTCCCAGAGCTCCACCCCAACCAGGAGCTCTAGTTAATGGAGAGCTCCCA
GCACACTCGGAGCTTGTGCTTTGTCTCCACGCAAAGCGATAAATAAAAGCATTGG
TGGCCTTTGGTCTTTGAATAAAGCCTGAGTAGGAAGTCTAGA);
3′UTR-002 (Myoglobin UTR)
(SEQ ID NO. 353)
(GCCCCTGCCGCTCCCACCCCCACCCATCTGGGCCCCGGGTTCAAGAGAGAGCGG
GGTCTGATCTCGTGTAGCCATATAGAGTTTGCTTCTGAGTGTCTGCTTTGTTTAGT
AGAGGTGGGCAGGAGGAGCTGAGGGGCTGGGGCTGGGGTGTTGAAGTTGGCTTT
GCATGCCCAGCGATGCGCCTCCCTGTGGGATGTCATCACCCTGGGAACCGGGAG
TGGCCCTTGGCTCACTGTGTTCTGCATGGTTTGGATCTGAATTAATTGTCCTTTCT
TCTAAATCCCAACCGAACTTCTTCCAACCTCCAAACTGGCTGTAACCCCAAATCC
AAGCCATTAACTACACCTGACAGTAGCAATTGTCTGATTAATCACTGGCCCCTTG
AAGACAGCAGAATGTCCCTTTGCAATGAGGAGGAGATCTGGGCTGGGCGGGCCA
GCTGGGGAAGCATTTGACTATCTGGAACTTGTGTGTGCCTCCTCAGGTATGGCAG
TGACTCACCTGGTTTTAATAAAACAACCTGCAACATCTCATGGTCTTTGAATAAA
GCCTGAGTAGGAAGTCTAGA);
3′UTR-003 (α-actin UTR)
(SEQ ID NO. 354)
(ACACACTCCACCTCCAGCACGCGACTTCTCAGGACGACGAATCTTCTCAATGGG
GGGGCGGCTGAGCTCCAGCCACCCCGCAGTCACTTTCTTTGTAACAACTTCCGTT
GCTGCCATCGTAAACTGACACAGTGTTTATAACGTGTACATACATTAACTTATTA
CCTCATTTTGTTATTTTTCGAAACAAAGCCCTGTGGAAGAAAATGGAAAACTTGA
AGAAGCATTAAAGTCATTCTGTTAAGCTGCGTAAATGGTCTTTGAATAAAGCCTG
AGTAGGAAGTCTAGA);
3′UTR-004 (Albumin UTR)
(SEQ ID NO. 355)
(CATCACATTTAAAAGCATCTCAGCCTACCATGAGAATAAGAGAAAGAAAATGA
AGATCAAAAGCTTATTCATCTGTTTTTCTTTTTCGTTGGTGTAAAGCCAACACCCT
GTCTAAAAAACATAAATTTCTTTAATCATTTTGCCTCTTTTCTCTGTGCTTCAATT
AATAAAAAATGGAAAGAATCTAATAGAGTGGTACAGCACTGTTATTTTTCAAAG
ATGTGTTGCTATCCTGAAAATTCTGTAGGTTCTGTGGAAGTTCCAGTGTTCTCTCT
TATTCCACTTCGGTAGAGGATTTCTAGTTTCTTGTGGGCTAATTAAATAAATCATT
AATACTCTTCTAATGGTCTTTGAATAAAGCCTGAGTAGGAAGTCTAGA);
3′UTR-005 (α-globin UTR)
(SEQ ID NO. 356)
(GCTGCCTTCTGCGGGGCTTGCCTTCTGGCCATGCCCTTCTTCTCTCCCTTGCACCT
GTACCTCTTGGTCTTTGAATAAAGCCTGAGTAGGAAGGCGGCCGCTCGAGCATGC
ATCTAGA);
3′UTR-006 (G-CSF UTR)
(SEQ ID NO. 357)
(GCCAAGCCCTCCCCATCCCATGTATTTATCTCTATTTAATATTTATGTCTATTTAA
GCCTCATATTTAAAGACAGGGAAGAGCAGAACGGAGCCCCAGGCCTCTGTGTCC
TTCCCTGCATTTCTGAGTTTCATTCTCCTGCCTGTAGCAGTGAGAAAAAGCTCCTG
TCCTCCCATCCCCTGGACTGGGAGGTAGATAGGTAAATACCAAGTATTTATTACT
ATGACTGCTCCCCAGCCCTGGCTCTGCAATGGGCACTGGGATGAGCCGCTGTGAG
CCCCTGGTCCTGAGGGTCCCCACCTGGGACCCTTGAGAGTATCAGGTCTCCCACG
TGGGAGACAAGAAATCCCTGTTTAATATTTAAACAGCAGTGTTCCCCATCTGGGT
CCTTGCACCCCTCACTCTGGCCTCAGCCGACTGCACAGCGGCCCCTGCATCCCCT
TGGCTGTGAGGCCCCTGGACAAGCAGAGGTGGCCAGAGCTGGGAGGCATGGCCC
TGGGGTCCCACGAATTTGCTGGGGAATCTCGTTTTTCTTCTTAAGACTTTTGGGAC
ATGGTTTGACTCCCGAACATCACCGACGCGTCTCCTGTTTTTCTGGGTGGCCTCGG
GACACCTGCCCTGCCCCCACGAGGGTCAGGACTGTGACTCTTTTTAGGGCCAGGC
AGGTGCCTGGACATTTGCCTTGCTGGACGGGGACTGGGGATGTGGGAGGGAGCA
GACAGGAGGAATCATGTCAGGCCTGTGTGTGAAAGGAAGCTCCACTGTCACCCT
CCACCTCTTCACCCCCCACTCACCAGTGTCCCCTCCACTGTCACATTGTAACTGAA
CTTCAGGATAATAAAGTGTTTGCCTCCATGGTCTTTGAATAAAGCCTGAGTAGGA
AGGCGGCCGCTCGAGCATGCATCTAGA);
3′UTR-007 (Col1a2; collagen, type I, alpha 2 UTR)
(SEQ ID NO. 358)
(ACTCAATCTAAATTAAAAAAGAAAGAAATTTGAAAAAACTTTCTCTTTGCCATTT
CTTCTTCTTCTTTTTTAACTGAAAGCTGAATCCTTCCATTTCTTCTGCACATCTACT
TGCTTAAATTGTGGGCAAAAGAGAAAAAGAAGGATTGATCAGAGCATTGTGCAA
TACAGTTTCATTAACTCCTTCCCCCGCTCCCCCAAAAATTTGAATTTTTTTTTCAA
CACTCTTACACCTGTTATGGAAAATGTCAACCTTTGTAAGAAAACCAAAATAAAA
ATTGAAAAATAAAAACCATAAACATTTGCACCACTTGTGGCTTTTGAATATCTTC
CACAGAGGGAAGTTTAAAACCCAAACTTCCAAAGGTTTAAACTACCTCAAAACA
CTTTCCCATGAGTGTGATCCACATTGTTAGGTGCTGACCTAGACAGAGATGAACT
GAGGTCCTTGTTTTGTTTTGTTCATAATACAAAGGTGCTAATTAATAGTATTTCAG
ATACTTGAAGAATGTTGATGGTGCTAGAAGAATTTGAGAAGAAATACTCCTGTAT
TGAGTTGTATCGTGTGGTGTATTTTTTAAAAAATTTGATTTAGCATTCATATTTTC
CATCTTATTCCCAATTAAAAGTATGCAGATTATTTGCCCAAATCTTCTTCAGATTC
AGCATTTGTTCTTTGCCAGTCTCATTTTCATCTTCTTCCATGGTTCCACAGAAGCT
TTGTTTCTTGGGCAAGCAGAAAAATTAAATTGTACCTATTTTGTATATGTGAGAT
GTTTAAATAAATTGTGAAAAAAATGAAATAAAGCATGTTTGGTTTTCCAAAAGA
ACATAT);
3′UTR-008 (Col6a2; collagen, type VI, alpha 2 UTR)
(SEQ ID NO. 359)
(CGCCGCCGCCCGGGCCCCGCAGTCGAGGGTCGTGAGCCCACCCCGTCCATGGTG
CTAAGCGGGCCCGGGTCCCACACGGCCAGCACCGCTGCTCACTCGGACGACGCC
CTGGGCCTGCACCTCTCCAGCTCCTCCCACGGGGTCCCCGTAGCCCCGGCCCCCG
CCCAGCCCCAGGTCTCCCCAGGCCCTCCGCAGGCTGCCCGGCCTCCCTCCCCCTG
CAGCCATCCCAAGGCTCCTGACCTACCTGGCCCCTGAGCTCTGGAGCAAGCCCTG
ACCCAATAAAGGCTTTGAACCCAT);
3′UTR-009 (RPN1; ribophorin I UTR)
(SEQ ID NO. 360)
(GGGGCTAGAGCCCTCTCCGCACAGCGTGGAGACGGGGCAAGGAGGGGGGTTAT
TAGGATTGGTGGTTTTGTTTTGCTTTGTTTAAAGCCGTGGGAAAATGGCACAACT
TTACCTCTGTGGGAGATGCAACACTGAGAGCCAAGGGGTGGGAGTTGGGATAAT
TTTTATATAAAAGAAGTTTTTCCACTTTGAATTGCTAAAAGTGGCATTTTTCCTAT
GTGCAGTCACTCCTCTCATTTCTAAAATAGGGACGTGGCCAGGCACGGTGGCTCA
TGCCTGTAATCCCAGCACTTTGGGAGGCCGAGGCAGGCGGCTCACGAGGTCAGG
AGATCGAGACTATCCTGGCTAACACGGTAAAACCCTGTCTCTACTAAAAGTACAA
AAAATTAGCTGGGCGTGGTGGTGGGCACCTGTAGTCCCAGCTACTCGGGAGGCT
GAGGCAGGAGAAAGGCATGAATCCAAGAGGCAGAGCTTGCAGTGAGCTGAGAT
CACGCCATTGCACTCCAGCCTGGGCAACAGTGTTAAGACTCTGTCTCAAATATAA
ATAAATAAATAAATAAATAAATAAATAAATAAAAATAAAGCGAGATGTTGCCCT
CAAA);
3′UTR-010 (LRP1; low density lipoprotein receptor-related
protein 1 UTR)
(SEQ ID NO. 361)
(GGCCCTGCCCCGTCGGACTGCCCCCAGAAAGCCTCCTGCCCCCTGCCAGTGAAG
TCCTTCAGTGAGCCCCTCCCCAGCCAGCCCTTCCCTGGCCCCGCCGGATGTATAA
ATGTAAAAATGAAGGAATTACATTTTATATGTGAGCGAGCAAGCCGGCAAGCGA
GCACAGTATTATTTCTCCATCCCCTCCCTGCCTGCTCCTTGGCACCCCCATGCTGC
CTTCAGGGAGACAGGCAGGGAGGGCTTGGGGCTGCACCTCCTACCCTCCCACCA
GAACGCACCCCACTGGGAGAGCTGGTGGTGCAGCCTTCCCCTCCCTGTATAAGAC
ACTTTGCCAAGGCTCTCCCCTCTCGCCCCATCCCTGCTTGCCCGCTCCCACAGCTT
CCTGAGGGCTAATTCTGGGAAGGGAGAGTTCTTTGCTGCCCCTGTCTGGAAGACG
TGGCTCTGGGTGAGGTAGGCGGGAAAGGATGGAGTGTTTTAGTTCTTGGGGGAG
GCCACCCCAAACCCCAGCCCCAACTCCAGGGGCACCTATGAGATGGCCATGCTC
AACCCCCCTCCCAGACAGGCCCTCCCTGTCTCCAGGGCCCCCACCGAGGTTCCCA
GGGCTGGAGACTTCCTCTGGTAAACATTCCTCCAGCCTCCCCTCCCCTGGGGACG
CCAAGGAGGTGGGCCACACCCAGGAAGGGAAAGCGGGCAGCCCCGTTTTGGGG
ACGTGAACGTTTTAATAATTTTTGCTGAATTCCTTTACAACTAAATAACACAGAT
ATTGTTATAAATAAAATTGT);
3′UTR-011 (Nnt1; cardiotrophin-like cytokine factor 1 UTR)
(SEQ ID NO. 362)
(ATATTAAGGATCAAGCTGTTAGCTAATAATGCCACCTCTGCAGTTTTGGGAACA
GGCAAATAAAGTATCAGTATACATGGTGATGTACATCTGTAGCAAAGCTCTTGGA
GAAAATGAAGACTGAAGAAAGCAAAGCAAAAACTGTATAGAGAGATTTTTCAAA
AGCAGTAATCCCTCAATTTTAAAAAAGGATTGAAAATTCTAAATGTCTTTCTGTG
CATATTTTTTGTGTTAGGAATCAAAAGTATTTTATAAAAGGAGAAAGAACAGCCT
CATTTTAGATGTAGTCCTGTTGGATTTTTTATGCCTCCTCAGTAACCAGAAATGTT
TTAAAAAACTAAGTGTTTAGGATTTCAAGACAACATTATACATGGCTCTGAAATA
TCTGACACAATGTAAACATTGCAGGCACCTGCATTTTATGTTTTTTTTTTCAACAA
ATGTGACTAATTTGAAACTTTTATGAACTTCTGAGCTGTCCCCTTGCAATTCAACC
GCAGTTTGAATTAATCATATCAAATCAGTTTTAATTTTTTAAATTGTACTTCAGAG
TCTATATTTCAAGGGCACATTTTCTCACTACTATTTTAATACATTAAAGGACTAAA
TAATCTTTCAGAGATGCTGGAAACAAATCATTTGCTTTATATGTTTCATTAGAATA
CCAATGAAACATACAACTTGAAAATTAGTAATAGTATTTTTGAAGATCCCATTTC
TAATTGGAGATCTCTTTAATTTCGATCAACTTATAATGTGTAGTACTATATTAAGT
GCACTTGAGTGGAATTCAACATTTGACTAATAAAATGAGTTCATCATGTTGGCAA
GTGATGTGGCAATTATCTCTGGTGACAAAAGAGTAAAATCAAATATTTCTGCCTG
TTACAAATATCAAGGAAGACCTGCTACTATGAAATAGATGACATTAATCTGTCTT
CACTGTTTATAATACGGATGGATTTTTTTTCAAATCAGTGTGTGTTTTGAGGTCTT
ATGTAATTGATGACATTTGAGAGAAATGGTGGCTTTTTTTAGCTACCTCTTTGTTC
ATTTAAGCACCAGTAAAGATCATGTCTTTTTATAGAAGTGTAGATTTTCTTTGTGA
CTTTGCTATCGTGCCTAAAGCTCTAAATATAGGTGAATGTGTGATGAATACTCAG
ATTATTTGTCTCTCTATATAATTAGTTTGGTACTAAGTTTCTCAAAAAATTATTAA
CACATGAAAGACAATCTCTAAACCAGAAAAAGAAGTAGTACAAATTTTGTTACT
GTAATGCTCGCGTTTAGTGAGTTTAAAACACACAGTATCTTTTGGTTTTATAATCA
GTTTCTATTTTGCTGTGCCTGAGATTAAGATCTGTGTATGTGTGTGTGTGTGTGTG
TGCGTTTGTGTGTTAAAGCAGAAAAGACTTTTTTAAAAGTTTTAAGTGATAAATG
CAATTTGTTAATTGATCTTAGATCACTAGTAAACTCAGGGCTGAATTATACCATG
TATATTCTATTAGAAGAAAGTAAACACCATCTTTATTCCTGCCCTTTTTCTTCTCT
CAAAGTAGTTGTAGTTATATCTAGAAAGAAGCAATTTTGATTTCTTGAAAAGGTA
GTTCCTGCACTCAGTTTAAACTAAAAATAATCATACTTGGATTTTATTTATTTTTG
TCATAGTAAAAATTTTAATTTATATATATTTTTATTTAGTATTATCTTATTCTTTGC
TATTTGCCAATCCTTTGTCATCAATTGTGTTAAATGAATTGAAAATTCATGCCCTG
TTCATTTTATTTTACTTTATTGGTTAGGATATTTAAAGGATTTTTGTATATATAATT
TCTTAAATTAATATTCCAAAAGGTTAGTGGACTTAGATTATAAATTATGGCAAAA
ATCTAAAAACAACAAAAATGATTTTTATACATTCTATTTCATTATTCCTCTTTTTC
CAATAAGTCATACAATTGGTAGATATGACTTATTTTATTTTTGTATTATTCACTAT
ATCTTTATGATATTTAAGTATAAATAATTAAAAAAATTTATTGTACCTTATAGTCT
GTCACCAAAAAAAAAAAATTATCTGTAGGTAGTGAAATGCTAATGTTGATTTGTC
TTTAAGGGCTTGTTAACTATCCTTTATTTTCTCATTTGTCTTAAATTAGGAGTTTGT
GTTTAAATTACTCATCTAAGCAAAAAATGTATATAAATCCCATTACTGGGTATAT
ACCCAAAGGATTATAAATCATGCTGCTATAAAGACACATGCACACGTATGTTTAT
TGCAGCACTATTCACAATAGCAAAGACTTGGAACCAACCCAAATGTCCATCAAT
GATAGACTTGATTAAGAAAATGTGCACATATACACCATGGAATACTATGCAGCC
ATAAAAAAGGATGAGTTCATGTCCTTTGTAGGGACATGGATAAAGCTGGAAACC
ATCATTCTGAGCAAACTATTGCAAGGACAGAAAACCAAACACTGCATGTTCTCAC
TCATAGGTGGGAATTGAACAATGAGAACACTTGGACACAAGGTGGGGAACACCA
CACACCAGGGCCTGTCATGGGGTGGGGGGAGTGGGGAGGGATAGCATTAGGAG
ATATACCTAATGTAAATGATGAGTTAATGGGTGCAGCACACCAACATGGCACAT
GTATACATATGTAGCAAACCTGCACGTTGTGCACATGTACCCTAGAACTTAAAGT
ATAATTAAAAAAAAAAAGAAAACAGAAGCTATTTATAAAGAAGTTATTTGCTGA
AATAAATGTGATCTTTCCCATTAAAAAAATAAAGAAATTTTGGGGTAAAAAAAC
ACAATATATTGTATTCTTGAAAAATTCTAAGAGAGTGGATGTGAAGTGTTCTCAC
CACAAAAGTGATAACTAATTGAGGTAATGCACATATTAATTAGAAAGATTTTGTC
ATTCCACAATGTATATATACTTAAAAATATGTTATACACAATAAATACATACATT
AAAAAATAAGTAAATGTA);
3′UTR-012 (Col6a1; collagen, type VI, alpha 1 UTR)
(SEQ ID NO. 363)
(CCCACCCTGCACGCCGGCACCAAACCCTGTCCTCCCACCCCTCCCCACTCATCAC
TAAACAGAGTAAAATGTGATGCGAATTTTCCCGACCAACCTGATTCGCTAGATTT
TTTTTAAGGAAAAGCTTGGAAAGCCAGGACACAACGCTGCTGCCTGCTTTGTGCA
GGGTCCTCCGGGGCTCAGCCCTGAGTTGGCATCACCTGCGCAGGGCCCTCTGGGG
CTCAGCCCTGAGCTAGTGTCACCTGCACAGGGCCCTCTGAGGCTCAGCCCTGAGC
TGGCGTCACCTGTGCAGGGCCCTCTGGGGCTCAGCCCTGAGCTGGCCTCACCTGG
GTTCCCCACCCCGGGCTCTCCTGCCCTGCCCTCCTGCCCGCCCTCCCTCCTGCCTG
CGCAGCTCCTTCCCTAGGCACCTCTGTGCTGCATCCCACCAGCCTGAGCAAGACG
CCCTCTCGGGGCCTGTGCCGCACTAGCCTCCCTCTCCTCTGTCCCCATAGCTGGTT
TTTCCCACCAATCCTCACCTAACAGTTACTTTACAATTAAACTCAAAGCAAGCTC
TTCTCCTCAGCTTGGGGCAGCCATTGGCCTCTGTCTCGTTTTGGGAAACCAAGGT
CAGGAGGCCGTTGCAGACATAAATCTCGGCGACTCGGCCCCGTCTCCTGAGGGT
CCTGCTGGTGACCGGCCTGGACCTTGGCCCTACAGCCCTGGAGGCCGCTGCTGAC
CAGCACTGACCCCGACCTCAGAGAGTACTCGCAGGGGCGCTGGCTGCACTCAAG
ACCCTCGAGATTAACGGTGCTAACCCCGTCTGCTCCTCCCTCCCGCAGAGACTGG
GGCCTGGACTGGACATGAGAGCCCCTTGGTGCCACAGAGGGCTGTGTCTTACTAG
AAACAACGCAAACCTCTCCTTCCTCAGAATAGTGATGTGTTCGACGTTTTATCAA
AGGCCCCCTTTCTATGTTCATGTTAGTTTTGCTCCTTCTGTGTTTTTTTCTGAACCA
TATCCATGTTGCTGACTTTTCCAAATAAAGGTTTTCACTCCTCTC);
3′UTR-013 (Calr; calreticulin UTR)
(SEQ ID NO. 364)
(AGAGGCCTGCCTCCAGGGCTGGACTGAGGCCTGAGCGCTCCTGCCGCAGAGCTG
GCCGCGCCAAATAATGTCTCTGTGAGACTCGAGAACTTTCATTTTTTTCCAGGCT
GGTTCGGATTTGGGGTGGATTTTGGTTTTGTTCCCCTCCTCCACTCTCCCCCACCC
CCTCCCCGCCCTTTTTTTTTTTTTTTTTTAAACTGGTATTTTATCTTTGATTCTCCTT
CAGCCCTCACCCCTGGTTCTCATCTTTCTTGATCAACATCTTTTCTTGCCTCTGTCC
CCTTCTCTCATCTCTTAGCTCCCCTCCAACCTGGGGGGCAGTGGTGTGGAGAAGC
CACAGGCCTGAGATTTCATCTGCTCTCCTTCCTGGAGCCCAGAGGAGGGCAGCAG
AAGGGGGTGGTGTCTCCAACCCCCCAGCACTGAGGAAGAACGGGGCTCTTCTCA
TTTCACCCCTCCCTTTCTCCCCTGCCCCCAGGACTGGGCCACTTCTGGGTGGGGCA
GTGGGTCCCAGATTGGCTCACACTGAGAATGTAAGAACTACAAACAAAATTTCT
ATTAAATTAAATTTTGTGTCTCC);
3′UTR-014 (Col1al; collagen, type I, alpha 1 UTR)
(SEQ ID NO. 365)
(CTCCCTCCATCCCAACCTGGCTCCCTCCCACCCAACCAACTTTCCCCCCAACCCG
GAAACAGACAAGCAACCCAAACTGAACCCCCTCAAAAGCCAAAAAATGGGAGA
CAATTTCACATGGACTTTGGAAAATATTTTTTTCCTTTGCATTCATCTCTCAAACT
TAGTTTTTATCTTTGACCAACCGAACATGACCAAAAACCAAAAGTGCATTCAACC
TTACCAAAAAAAAAAAAAAAAAAAGAATAAATAAATAACTTTTTAAAAAAGGA
AGCTTGGTCCACTTGCTTGAAGACCCATGCGGGGGTAAGTCCCTTTCTGCCCGTT
GGGCTTATGAAACCCCAATGCTGCCCTTTCTGCTCCTTTCTCCACACCCCCCTTGG
GGCCTCCCCTCCACTCCTTCCCAAATCTGTCTCCCCAGAAGACACAGGAAACAAT
GTATTGTCTGCCCAGCAATCAAAGGCAATGCTCAAACACCCAAGTGGCCCCCAC
CCTCAGCCCGCTCCTGCCCGCCCAGCACCCCCAGGCCCTGGGGGACCTGGGGTTC
TCAGACTGCCAAAGAAGCCTTGCCATCTGGCGCTCCCATGGCTCTTGCAACATCT
CCCCTTCGTTTTTGAGGGGGTCATGCCGGGGGAGCCACCAGCCCCTCACTGGGTT
CGGAGGAGAGTCAGGAAGGGCCACGACAAAGCAGAAACATCGGATTTGGGGAA
CGCGTGTCAATCCCTTGTGCCGCAGGGCTGGGCGGGAGAGACTGTTCTGTTCCTT
GTGTAACTGTGTTGCTGAAAGACTACCTCGTTCTTGTCTTGATGTGTCACCGGGG
CAACTGCCTGGGGGCGGGGATGGGGGCAGGGTGGAAGCGGCTCCCCATTTTATA
CCAAAGGTGCTACATCTATGTGATGGGTGGGGTGGGGAGGGAATCACTGGTGCT
ATAGAAATTGAGATGCCCCCCCAGGCCAGCAAATGTTCCTTTTTGTTCAAAGTCT
ATTTTTATTCCTTGATATTTTTCTTTTTTTTTTTTTTTTTTTGTGGATGGGGACTTGT
GAATTTTTCTAAAGGTGCTATTTAACATGGGAGGAGAGCGTGTGCGGCTCCAGCC
CAGCCCGCTGCTCACTTTCCACCCTCTCTCCACCTGCCTCTGGCTTCTCAGGCCTC
TGCTCTCCGACCTCTCTCCTCTGAAACCCTCCTCCACAGCTGCAGCCCATCCTCCC
GGCTCCCTCCTAGTCTGTCCTGCGTCCTCTGTCCCCGGGTTTCAGAGACAACTTCC
CAAAGCACAAAGCAGTTTTTCCCCCTAGGGGTGGGAGGAAGCAAAAGACTCTGT
ACCTATTTTGTATGTGTATAATAATTTGAGATGTTTTTAATTATTTTGATTGCTGG
AATAAAGCATGTGGAAATGACCCAAACATAATCCGCAGTGGCCTCCTAATTTCCT
TCTTTGGAGTTGGGGGAGGGGTAGACATGGGGAAGGGGCTTTGGGGTGATGGGC
TTGCCTTCCATTCCTGCCCTTTCCCTCCCCACTATTCTCTTCTAGATCCCTCCATAA
CCCCACTCCCCTTTCTCTCACCCTTCTTATACCGCAAACCTTTCTACTTCCTCTTTC
ATTTTCTATTCTTGCAATTTCCTTGCACCTTTTCCAAATCCTCTTCTCCCCTGCAAT
ACCATACAGGCAATCCACGTGCACAACACACACACACACTCTTCACATCTGGGG
TTGTCCAAACCTCATACCCACTCCCCTTCAAGCCCATCCACTCTCCACCCCCTGGA
TGCCCTGCACTTGGTGGCGGTGGGATGCTCATGGATACTGGGAGGGTGAGGGGA
GTGGAACCCGTGAGGAGGACCTGGGGGCCTCTCCTTGAACTGACATGAAGGGTC
ATCTGGCCTCTGCTCCCTTCTCACCCACGCTGACCTCCTGCCGAAGGAGCAACGC
AACAGGAGAGGGGTCTGCTGAGCCTGGCGAGGGTCTGGGAGGGACCAGGAGGA
AGGCGTGCTCCCTGCTCGCTGTCCTGGCCCTGGGGGAGTGAGGGAGACAGACAC
CTGGGAGAGCTGTGGGGAAGGCACTCGCACCGTGCTCTTGGGAAGGAAGGAGAC
CTGGCCCTGCTCACCACGGACTGGGTGCCTCGACCTCCTGAATCCCCAGAACACA
ACCCCCCTGGGCTGGGGTGGTCTGGGGAACCATCGTGCCCCCGCCTCCCGCCTAC
TCCTTTTTAAGCTT);
3′UTR-015 (Plod 1; procollagen-lysine, 2-oxoglutarate
5-dioxygenase 1 UTR)
(SEQ ID NO. 366)
(TTGGCCAGGCCTGACCCTCTTGGACCTTTCTTCTTTGCCGACAACCACTGCCCAG
CAGCCTCTGGGACCTCGGGGTCCCAGGGAACCCAGTCCAGCCTCCTGGCTGTTGA
CTTCCCATTGCTCTTGGAGCCACCAATCAAAGAGATTCAAAGAGATTCCTGCAGG
CCAGAGGCGGAACACACCTTTATGGCTGGGGCTCTCCGTGGTGTTCTGGACCCAG
CCCCTGGAGACACCATTCACTTTTACTGCTTTGTAGTGACTCGTGCTCTCCAACCT
GTCTTCCTGAAAAACCAAGGCCCCCTTCCCCCACCTCTTCCATGGGGTGAGACTT
GAGCAGAACAGGGGCTTCCCCAAGTTGCCCAGAAAGACTGTCTGGGTGAGAAGC
CATGGCCAGAGCTTCTCCCAGGCACAGGTGTTGCACCAGGGACTTCTGCTTCAAG
TTTTGGGGTAAAGACACCTGGATCAGACTCCAAGGGCTGCCCTGAGTCTGGGACT
TCTGCCTCCATGGCTGGTCATGAGAGCAAACCGTAGTCCCCTGGAGACAGCGACT
CCAGAGAACCTCTTGGGAGACAGAAGAGGCATCTGTGCACAGCTCGATCTTCTA
CTTGCCTGTGGGGAGGGGAGTGACAGGTCCACACACCACACTGGGTCACCCTGT
CCTGGATGCCTCTGAAGAGAGGGACAGACCGTCAGAAACTGGAGAGTTTCTATT
AAAGGTCATTTAAACCA);
3′UTR-016 (Nucb 1; nucleobindin 1 UTR)
(SEQ ID NO. 367)
(TCCTCCGGGACCCCAGCCCTCAGGATTCCTGATGCTCCAAGGCGACTGATGGGC
GCTGGATGAAGTGGCACAGTCAGCTTCCCTGGGGGCTGGTGTCATGTTGGGCTCC
TGGGGCGGGGGCACGGCCTGGCATTTCACGCATTGCTGCCACCCCAGGTCCACCT
GTCTCCACTTTCACAGCCTCCAAGTCTGTGGCTCTTCCCTTCTGTCCTCCGAGGGG
CTTGCCTTCTCTCGTGTCCAGTGAGGTGCTCAGTGATCGGCTTAACTTAGAGAAG
CCCGCCCCCTCCCCTTCTCCGTCTGTCCCAAGAGGGTCTGCTCTGAGCCTGCGTTC
CTAGGTGGCTCGGCCTCAGCTGCCTGGGTTGTGGCCGCCCTAGCATCCTGTATGC
CCACAGCTACTGGAATCCCCGCTGCTGCTCCGGGCCAAGCTTCTGGTTGATTAAT
GAGGGCATGGGGTGGTCCCTCAAGACCTTCCCCTACCTTTTGTGGAACCAGTGAT
GCCTCAAAGACAGTGTCCCCTCCACAGCTGGGTGCCAGGGGCAGGGGATCCTCA
GTATAGCCGGTGAACCCTGATACCAGGAGCCTGGGCCTCCCTGAACCCCTGGCTT
CCAGCCATCTCATCGCCAGCCTCCTCCTGGACCTCTTGGCCCCCAGCCCCTTCCCC
ACACAGCCCCAGAAGGGTCCCAGAGCTGACCCCACTCCAGGACCTAGGCCCAGC
CCCTCAGCCTCATCTGGAGCCCCTGAAGACCAGTCCCACCCACCTTTCTGGCCTC
ATCTGACACTGCTCCGCATCCTGCTGTGTGTCCTGTTCCATGTTCCGGTTCCATCC
AAATACACTTTCTGGAACAAA);
3′UTR-017 (α-globin)
(SEQ ID NO. 368)
(GCTGGAGCCTCGGTGGCCATGCTTCTTGCCCCTTGGGCCTCCCCCCAGCCCCTCC
TCCCCTTCCTGCACCCGTACCCCCGTGGTCTTTGAATAAAGTCTGAGTGGGCGGC);
or
3′UTR-018
(SEQ ID NO. 369)
(TGATAATAGGCTGGAGCCTCGGTGGCCATGCTTCTTGCCCCTTGGGCCTCCCCCC
AGCCCCTCCTCCCCTTCCTGCACCCGTACCCCCGTGGTCTTTGAATAAAGTCTGA
GTGGGCGGC).

[0509] In certain embodiments, the 5′UTR and/or 3′UTR sequence of the invention comprises a nucleotide sequence at least about 60%, at least about 70%, at least about 80%, at least about 90%, at least about 95%, at least about 96%, at least about 97%, at least about 98%, at least about 99%, or about 100% identical to a sequence selected from the group consisting of 5′UTR sequences comprising any of SEQ ID NOs: 327-351 and/or 3′UTR sequences comprises any of SEQ ID NOs: 352-369, and any combination thereof.

[0510] The polynucleotides of the invention can comprise combinations of features. For example, the ORF can be flanked by a 5′UTR that comprises a strong Kozak translational initiation signal and/or a 3′UTR comprising an oligo(dT) sequence for templated addition of a poly-A tail. A 5′UTR can comprise a first polynucleotide fragment and a second polynucleotide fragment from the same and/or different UTRs (see, e.g., US2010/0293625, herein incorporated by reference in its entirety).

[0511] It is also within the scope of the present invention to have patterned UTRs. As used herein “patterned UTRs” include a repeating or alternating pattern, such as ABABAB or AABBAABBAABB or ABCABCABC or variants thereof repeated once, twice, or more than 3 times. In these patterns, each letter, A, B, or C represent a different UTR nucleic acid sequence.

[0512] Other non-UTR sequences can be used as regions or subregions within the polynucleotides of the invention. For example, introns or portions of intron sequences can be incorporated into the polynucleotides of the invention. Incorporation of intronic sequences can increase protein production as well as polynucleotide expression levels. In some embodiments, the polynucleotide of the invention comprises an internal ribosome entry site (IRES) instead of or in addition to a UTR (see, e.g., Yakubov et al., Biochem. Biophys. Res. Commun. 2010 394(1):189-193, the contents of which are incorporated herein by reference in their entirety). In some embodiments, the polynucleotide of the invention comprises 5′ and/or 3′ sequence associated with the 5′ and/or 3′ ends of rubella virus (RV) genomic RNA, respectively, or deletion derivatives thereof, including the 5′ proximal open reading frame of RV RNA encoding nonstructural proteins (e.g., see Pogue et al., J. Virol. 67(12):7106-7117, the contents of which are incorporated herein by reference in their entirety). Viral capsid sequences can also be used as a translational enhancer, e.g., the 5′ portion of a capsid sequence, (e.g., semliki forest virus and sindbis virus capsid RNAs as described in Sjöberg et al., Biotechnology (NY) 1994 12(11):1127-1131, and Frolov and Schlesinger J. Virol. 1996 70(2):1182-1190, the contents of each of which are incorporated herein by reference in their entirety). In some embodiments, the polynucleotide comprises an IRES instead of a 5′UTR sequence. In some embodiments, the polynucleotide comprises an ORF and a viral capsid sequence. In some embodiments, the polynucleotide comprises a synthetic 5′UTR in combination with a non-synthetic 3′UTR.

[0513] In some embodiments, the UTR can also include at least one translation enhancer polynucleotide, translation enhancer element, or translational enhancer elements (collectively, “TEE,” which refers to nucleic acid sequences that increase the amount of polypeptide or protein produced from a polynucleotide. As a non-limiting example, the TEE can include those described in US2009/0226470, incorporated herein by reference in its entirety, and others known in the art. As a non-limiting example, the TEE can be located between the transcription promoter and the start codon. In some embodiments, the 5′UTR comprises a TEE.

[0514] In one aspect, a TEE is a conserved element in a UTR that can promote translational activity of a nucleic acid such as, but not limited to, cap-dependent or cap-independent translation. The conservation of these sequences has been shown across 14 species including humans. See, e.g., Panek et al., “An evolutionary conserved pattern of 18S rRNA sequence complementarity to mRNA 5′UTRs and its implications for eukaryotic gene translation regulation,” Nucleic Acids Research 2013, doi:10.1093/nar/gkt548, incorporated herein by reference in its entirety.

[0515] In one non-limiting example, the TEE comprises the TEE sequence in the 5′-leader of the Gtx homeodomain protein. See Chappell et al., PNAS 2004 101:9590-9594, incorporated herein by reference in its entirety.

[0516] In another non-limiting example, the TEE comprises a TEE having one or more of the sequences of SEQ ID NOs: 1-35 in US2009/0226470, US2013/0177581, and WO2009/075886; SEQ ID NOs: 1-5 and 7-645 in WO2012/009644; and SEQ ID NO: 1 WO1999/024595, U.S. Pat. Nos. 6,310,197, and 6,849,405; the contents of each of which are incorporated herein by reference in their entirety.

[0517] In some embodiments, the TEE is an internal ribosome entry site (IRES), HCV-IRES, or an IRES element such as, but not limited to, those described in: U.S. Pat. No. 7,468,275, US2007/0048776, US2011/0124100, WO2007/025008, and WO2001/055369; the contents of each of which re incorporated herein by reference in their entirety. The IRES elements can include, but are not limited to, the Gtx sequences (e.g., Gtx9-nt, Gtx8-nt, Gtx7-nt) as described by Chappell et al., PNAS 2004 101:9590-9594, Zhou et al., PNAS 2005 102:6273-6278, US2007/0048776, US2011/0124100, and WO2007/025008; the contents of each of which are incorporated herein by reference in their entirety.

[0518] “Translational enhancer polynucleotide” or “translation enhancer polynucleotide sequence” refer to a polynucleotide that includes one or more of the TEE provided herein and/or known in the art (see. e.g., U.S. Pat. Nos. 6,310,197, 6,849,405, 7,456,273, 7,183,395, US2009/0226470, US2007/0048776, US2011/0124100, US2009/0093049, US2013/0177581, WO2009/075886, WO2007/025008, WO2012/009644, WO2001/055371, WO1999/024595, EP2610341A1, and EP2610340A1; the contents of each of which are incorporated herein by reference in their entirety), or their variants, homologs, or functional derivatives. In some embodiments, the polynucleotide of the invention comprises one or multiple copies of a TEE.

[0519] The TEE in a translational enhancer polynucleotide can be organized in one or more sequence segments. A sequence segment can harbor one or more of the TEEs provided herein, with each TEE being present in one or more copies. When multiple sequence segments are present in a translational enhancer polynucleotide, they can be homogenous or heterogeneous. Thus, the multiple sequence segments in a translational enhancer polynucleotide can harbor identical or different types of the TEE provided herein, identical or different number of copies of each of the TEE, and/or identical or different organization of the TEE within each sequence segment. In one embodiment, the polynucleotide of the invention comprises a translational enhancer polynucleotide sequence.

[0520] In some embodiments, a 5′UTR and/or 3′UTR of a polynucleotide of the invention comprises at least one TEE or portion thereof that is disclosed in: WO1999/024595, WO2012/009644, WO2009/075886, WO2007/025008, WO1999/024595, WO2001/055371, EP2610341A1, EP2610340A1, U.S. Pat. Nos. 6,310,197, 6,849,405, 7,456,273, 7,183,395, US2009/0226470, US2011/0124100, US2007/0048776, US2009/0093049, or US2013/0177581, the contents of each are incorporated herein by reference in their entirety. In some embodiments, a 5′UTR and/or 3′UTR of a polynucleotide of the invention comprises a TEE that is at least 5%, at least 10%, at least 15%, at least 20%, at least 25%, at least 30%, at least 35%, at least 40%, at least 45%, at least 50%, at least 55%, at least 60%, at least 65%, at least 70%, at least 75%, at least 80%, at least 85%, at least 90%, at least 95%, at least 96%, at least 97%, at least 98%, at least 99%, or 100% identical to a TEE disclosed in: US2009/0226470, US2007/0048776, US2013/0177581, US2011/0124100, WO1999/024595, WO2012/009644, WO2009/075886, WO2007/025008, EP2610341A1, EP2610340A1, U.S. Pat. Nos. 6,310,197, 6,849,405, 7,456,273, 7,183,395, Chappell et al., PNAS 2004 101:9590-9594, Zhou et al., PNAS 2005 102:6273-6278, and Supplemental Table 1 and in Supplemental Table 2 of Wellensiek et al., “Genome-wide profiling of human cap-independent translation-enhancing elements,” Nature Methods 2013, DOI:10.1038/NMETH.2522; the contents of each of which are incorporated herein by reference in their entirety.

[0521] In some embodiments, a 5′UTR and/or 3′UTR of a polynucleotide of the invention comprises a TEE which is selected from a 5-30 nucleotide fragment, a 5-25 nucleotide fragment, a 5-20 nucleotide fragment, a 5-15 nucleotide fragment, or a 5-10 nucleotide fragment (including a fragment of 5, 6, 7, 8, 9, 10, 11, 12, 13, 14, 15, 16, 17, 18, 19, 20, 21, 22, 23, 24, 25, 26, 27, 28, 29, or 30 nucleotides) of a TEE sequence disclosed in: US2009/0226470, US2007/0048776, US2013/0177581, US2011/0124100, WO1999/024595, WO2012/009644, WO2009/075886, WO2007/025008, EP2610341A1, EP2610340A1, U.S. Pat. Nos. 6,310,197, 6,849,405, 7,456,273, 7,183,395, Chappell et al., PNAS 2004 101:9590-9594, Zhou et al., PNAS 2005 102:6273-6278, and Supplemental Table 1 and in Supplemental Table 2 of Wellensiek et al., “Genome-wide profiling of human cap-independent translation-enhancing elements,” Nature Methods 2013, DOI:10.1038/NMETH.2522.

[0522] In some embodiments, a 5′UTR and/or 3′UTR of a polynucleotide of the invention comprises a TEE which is a transcription regulatory element described in any of U.S. Pat. Nos. 7,456,273, 7,183,395, US2009/0093049, and WO2001/055371, the contents of each of which are incorporated herein by reference in their entirety. The transcription regulatory elements can be identified by methods known in the art, such as, but not limited to, the methods described in U.S. Pat. Nos. 7,456,273, 7,183,395, US2009/0093049, and WO2001/055371.

[0523] In some embodiments, a 5′UTR and/or 3′UTR comprising at least one TEE described herein can be incorporated in a monocistronic sequence such as, but not limited to, a vector system or a nucleic acid vector. As non-limiting examples, the vector systems and nucleic acid vectors can include those described in U.S. Pat. Nos. 7,456,273, 7,183,395, US2007/0048776, US2009/0093049, US2011/0124100, WO2007/025008, and WO2001/055371.

[0524] In some embodiments, a 5′UTR and/or 3′UTR of a polynucleotide of the invention comprises a TEE or portion thereof described herein. In some embodiments, the TEEs in the 3′UTR can be the same and/or different from the TEE located in the 5′UTR.

[0525] In some embodiments, a 5′UTR and/or 3′UTR of a polynucleotide of the invention can include at least 1, at least 2, at least 3, at least 4, at least 5, at least 6, at least 7, at least 8, at least 9, at least 10, at least 11, at least 12, at least 13, at least 14, at least 15, at least 16, at least 17, at least 18 at least 19, at least 20, at least 21, at least 22, at least 23, at least 24, at least 25, at least 30, at least 35, at least 40, at least 45, at least 50, at least 55 or more than 60 TEE sequences. In one embodiment, the 5′UTR of a polynucleotide of the invention can include 1-60, 1-55, 1-50, 1-45, 1-40, 1-35, 1-30, 1-25, 1-20, 1-15, 1-10, 9, 8, 7, 6, 5, 4, 3, 2, or 1 TEE sequences. The TEE sequences in the 5′UTR of the polynucleotide of the invention can be the same or different TEE sequences. A combination of different TEE sequences in the 5′UTR of the polynucleotide of the invention can include combinations in which more than one copy of any of the different TEE sequences are incorporated. The TEE sequences can be in a pattern such as ABABAB or AABBAABBAABB or ABCABCABC or variants thereof repeated one, two, three, or more than three times. In these patterns, each letter, A, B, or C represent a different TEE nucleotide sequence.

[0526] In some embodiments, the TEE can be identified by the methods described in US2007/0048776, US2011/0124100, WO2007/025008, WO2012/009644, the contents of each of which are incorporated herein by reference in their entirety.

[0527] In some embodiments, the 5′UTR and/or 3′UTR comprises a spacer to separate two TEE sequences. As a non-limiting example, the spacer can be a 15 nucleotide spacer and/or other spacers known in the art. As another non-limiting example, the 5′UTR and/or 3′UTR comprises a TEE sequence-spacer module repeated at least once, at least twice, at least 3 times, at least 4 times, at least 5 times, at least 6 times, at least 7 times, at least 8 times, at least 9 times, at least 10 times, or more than 10 times in the 5′UTR and/or 3′UTR, respectively. In some embodiments, the 5′UTR and/or 3′UTR comprises a TEE sequence-spacer module repeated 1, 2, 3, 4, 5, 6, 7, 8, 9, or 10 times.

[0528] In some embodiments, the spacer separating two TEE sequences can include other sequences known in the art that can regulate the translation of the polynucleotide of the invention, e.g., miR sequences described herein (e.g., miR binding sites and miR seeds). As a non-limiting example, each spacer used to separate two TEE sequences can include a different miR sequence or component of a miR sequence (e.g., miR seed sequence).

[0529] In some embodiments, a polynucleotide of the invention comprises a miR and/or TEE sequence. In some embodiments, the incorporation of a miR sequence and/or a TEE sequence into a polynucleotide of the invention can change the shape of the stem loop region, which can increase and/or decrease translation. See e.g., Kedde et al., Nature Cell Biology 2010 12(10):1014-20, herein incorporated by reference in its entirety).

MicroRNA (miRNA) Binding Sites

[0530] Polynucleotides of the invention can include regulatory elements, for example, microRNA (miRNA) binding sites, transcription factor binding sites, structured mRNA sequences and/or motifs, artificial binding sites engineered to act as pseudo-receptors for endogenous nucleic acid binding molecules, and combinations thereof. In some embodiments, polynucleotides including such regulatory elements are referred to as including “sensor sequences”. Non-limiting examples of sensor sequences are described in U.S. Publication 2014/0200261, the contents of which are incorporated herein by reference in their entirety.

[0531] In some embodiments, a polynucleotide (e.g., a ribonucleic acid (RNA), e.g., a messenger RNA (mRNA)) of the invention comprises an open reading frame (ORF) encoding a polypeptide of interest and further comprises one or more miRNA binding site(s). Inclusion or incorporation of miRNA binding site(s) provides for regulation of polynucleotides of the invention, and in turn, of the polypeptides encoded therefrom, based on tissue-specific and/or cell-type specific expression of naturally-occurring miRNAs.

[0532] A miRNA, e.g., a natural-occurring miRNA, is a 19-25 nucleotide long noncoding RNA that binds to a polynucleotide and down-regulates gene expression either by reducing stability or by inhibiting translation of the polynucleotide. A miRNA sequence comprises a “seed” region, i.e., a sequence in the region of positions 2-8 of the mature miRNA. A miRNA seed can comprise positions 2-8 or 2-7 of the mature miRNA. In some embodiments, a miRNA seed can comprise 7 nucleotides (e.g., nucleotides 2-8 of the mature miRNA), wherein the seed-complementary site in the corresponding miRNA binding site is flanked by an adenosine (A) opposed to miRNA position 1. In some embodiments, a miRNA seed can comprise 6 nucleotides (e.g., nucleotides 2-7 of the mature miRNA), wherein the seed-complementary site in the corresponding miRNA binding site is flanked by an adenosine (A) opposed to miRNA position 1. See, for example, Grimson A, Farh K K, Johnston W K, Garrett-Engele P, Lim L P, Bartel D P; Mol Cell. 2007 Jul. 6; 27(1):91-105. miRNA profiling of the target cells or tissues can be conducted to determine the presence or absence of miRNA in the cells or tissues. In some embodiments, a polynucleotide (e.g., a ribonucleic acid (RNA), e.g., a messenger RNA (mRNA)) of the invention comprises one or more microRNA binding sites, microRNA target sequences, microRNA complementary sequences, or microRNA seed complementary sequences. Such sequences can correspond to, e.g., have complementarity to, any known microRNA such as those taught in US Publication US2005/0261218 and US Publication US2005/0059005, the contents of each of which are incorporated herein by reference in their entirety.

[0533] As used herein, the term “microRNA (miRNA or miR) binding site” refers to a sequence within a polynucleotide, e.g., within a DNA or within an RNA transcript, including in the 5′UTR and/or 3′UTR, that has sufficient complementarity to all or a region of a miRNA to interact with, associate with or bind to the miRNA. In some embodiments, a polynucleotide of the invention comprising an ORF encoding a polypeptide of interest and further comprises one or more miRNA binding site(s). In exemplary embodiments, a 5′UTR and/or 3′UTR of the polynucleotide (e.g., a ribonucleic acid (RNA), e.g., a messenger RNA (mRNA)) comprises the one or more miRNA binding site(s).

[0534] A miRNA binding site having sufficient complementarity to a miRNA refers to a degree of complementarity sufficient to facilitate miRNA-mediated regulation of a polynucleotide, e.g., miRNA-mediated translational repression or degradation of the polynucleotide. In exemplary aspects of the invention, a miRNA binding site having sufficient complementarity to the miRNA refers to a degree of complementarity sufficient to facilitate miRNA-mediated degradation of the polynucleotide, e.g., miRNA-guided RNA-induced silencing complex (RISC)-mediated cleavage of mRNA. The miRNA binding site can have complementarity to, for example, a 19-25 nucleotide miRNA sequence, to a 19-23 nucleotide miRNA sequence, or to a 22 nucleotide miRNA sequence. A miRNA binding site can be complementary to only a portion of a miRNA, e.g., to a portion less than 1, 2, 3, or 4 nucleotides of the full length of a naturally-occurring miRNA sequence. Full or complete complementarity (e.g., full complementarity or complete complementarity over all or a significant portion of the length of a naturally-occurring miRNA) is preferred when the desired regulation is mRNA degradation.

[0535] In some embodiments, a miRNA binding site includes a sequence that has complementarity (e.g., partial or complete complementarity) with an miRNA seed sequence. In some embodiments, the miRNA binding site includes a sequence that has complete complementarity with a miRNA seed sequence. In some embodiments, a miRNA binding site includes a sequence that has complementarity (e.g., partial or complete complementarity) with an miRNA sequence. In some embodiments, the miRNA binding site includes a sequence that has complete complementarity with a miRNA sequence. In some embodiments, a miRNA binding site has complete complementarity with a miRNA sequence but for 1, 2, or 3 nucleotide substitutions, terminal additions, and/or truncations.

[0536] In some embodiments, the miRNA binding site is the same length as the corresponding miRNA. In other embodiments, the miRNA binding site is one, two, three, four, five, six, seven, eight, nine, ten, eleven or twelve nucleotide(s) shorter than the corresponding miRNA at the 5′ terminus, the 3′ terminus, or both. In still other embodiments, the microRNA binding site is two nucleotides shorter than the corresponding microRNA at the 5′ terminus, the 3′ terminus, or both. The miRNA binding sites that are shorter than the corresponding miRNAs are still capable of degrading the mRNA incorporating one or more of the miRNA binding sites or preventing the mRNA from translation.

[0537] In some embodiments, the miRNA binding site binds the corresponding mature miRNA that is part of an active RISC containing Dicer. In another embodiment, binding of the miRNA binding site to the corresponding miRNA in RISC degrades the mRNA containing the miRNA binding site or prevents the mRNA from being translated. In some embodiments, the miRNA binding site has sufficient complementarity to miRNA so that a RISC complex comprising the miRNA cleaves the polynucleotide comprising the miRNA binding site. In other embodiments, the miRNA binding site has imperfect complementarity so that a RISC complex comprising the miRNA induces instability in the polynucleotide comprising the miRNA binding site. In another embodiment, the miRNA binding site has imperfect complementarity so that a RISC complex comprising the miRNA represses transcription of the polynucleotide comprising the miRNA binding site.

[0538] In some embodiments, the miRNA binding site has one, two, three, four, five, six, seven, eight, nine, ten, eleven or twelve mismatch(es) from the corresponding miRNA. In some embodiments, the miRNA binding site has at least about ten, at least about eleven, at least about twelve, at least about thirteen, at least about fourteen, at least about fifteen, at least about sixteen, at least about seventeen, at least about eighteen, at least about nineteen, at least about twenty, or at least about twenty-one contiguous nucleotides complementary to at least about ten, at least about eleven, at least about twelve, at least about thirteen, at least about fourteen, at least about fifteen, at least about sixteen, at least about seventeen, at least about eighteen, at least about nineteen, at least about twenty, or at least about twenty-one, respectively, contiguous nucleotides of the corresponding miRNA.

[0539] By engineering one or more miRNA binding sites into a polynucleotide of the invention, the polynucleotide can be targeted for degradation or reduced translation, provided the miRNA in question is available. This can reduce off-target effects upon delivery of the polynucleotide. For example, if a polynucleotide of the invention is not intended to be delivered to a tissue or cell but ends up is said tissue or cell, then a miRNA abundant in the tissue or cell can inhibit the expression of the gene of interest if one or multiple binding sites of the miRNA are engineered into the 5′UTR and/or 3′UTR of the polynucleotide.

[0540] Conversely, miRNA binding sites can be removed from polynucleotide sequences in which they naturally occur in order to increase protein expression in specific tissues. For example, a binding site for a specific miRNA can be removed from a polynucleotide to improve protein expression in tissues or cells containing the miRNA.

[0541] In one embodiment, a polynucleotide of the invention can include at least one miRNA-binding site in the 5′UTR and/or 3′UTR in order to regulate cytotoxic or cytoprotective mRNA therapeutics to specific cells such as, but not limited to, normal and/or cancerous cells. In another embodiment, a polynucleotide of the invention can include two, three, four, five, six, seven, eight, nine, ten, or more miRNA-binding sites in the 5′-UTR and/or 3′-UTR in order to regulate cytotoxic or cytoprotective mRNA therapeutics to specific cells such as, but not limited to, normal and/or cancerous cells.

[0542] Regulation of expression in multiple tissues can be accomplished through introduction or removal of one or more miRNA binding sites, e.g., one or more distinct miRNA binding sites. The decision whether to remove or insert a miRNA binding site can be made based on miRNA expression patterns and/or their profilings in tissues and/or cells in development and/or disease. Identification of miRNAs, miRNA binding sites, and their expression patterns and role in biology have been reported (e.g., Bonauer et al., Curr Drug Targets 2010 11:943-949; Anand and Cheresh Curr Opin Hematol 2011 18:171-176; Contreras and Rao Leukemia 2012 26:404-413 (2011 Dec. 20. doi: 10.1038/leu.2011.356); Bartel Cell 2009 136:215-233; Landgraf et al, Cell, 2007 129:1401-1414; Gentner and Naldini, Tissue Antigens. 2012 80:393-403 and all references therein; each of which is incorporated herein by reference in its entirety).

[0543] miRNAs and miRNA binding sites can correspond to any known sequence, including non-limiting examples described in U.S. Publication Nos. 2014/0200261, 2005/0261218, and 2005/0059005, each of which are incorporated herein by reference in their entirety.

[0544] Examples of tissues where miRNA are known to regulate mRNA, and thereby protein expression, include, but are not limited to, liver (miR-122), muscle (miR-133, miR-206, miR-208), endothelial cells (miR-17-92, miR-126), myeloid cells (miR-142-3p, miR-142-5p, miR-16, miR-21, miR-223, miR-24, miR-27), adipose tissue (let-7, miR-30c), heart (miR-1d, miR-149), kidney (miR-192, miR-194, miR-204), and lung epithelial cells (let-7, miR-133, miR-126).

[0545] Specifically, miRNAs are known to be differentially expressed in immune cells (also called hematopoietic cells), such as antigen presenting cells (APCs) (e.g., dendritic cells and macrophages), macrophages, monocytes, B lymphocytes, T lymphocytes, granulocytes, natural killer cells, etc. Immune cell specific miRNAs are involved in immunogenicity, autoimmunity, the immune-response to infection, inflammation, as well as unwanted immune response after gene therapy and tissue/organ transplantation. Immune cells specific miRNAs also regulate many aspects of development, proliferation, differentiation and apoptosis of hematopoietic cells (immune cells). For example, miR-142 and miR-146 are exclusively expressed in immune cells, particularly abundant in myeloid dendritic cells. It has been demonstrated that the immune response to a polynucleotide can be shut-off by adding miR-142 binding sites to the 3′-UTR of the polynucleotide, enabling more stable gene transfer in tissues and cells. miR-142 efficiently degrades exogenous polynucleotides in antigen presenting cells and suppresses cytotoxic elimination of transduced cells (e.g., Annoni A et al., blood, 2009, 114, 5152-5161; Brown B D, et al., Nat med. 2006, 12(5), 585-591; Brown B D, et al., blood, 2007, 110(13): 4144-4152, each of which is incorporated herein by reference in its entirety).

[0546] An antigen-mediated immune response can refer to an immune response triggered by foreign antigens, which, when entering an organism, are processed by the antigen presenting cells and displayed on the surface of the antigen presenting cells. T cells can recognize the presented antigen and induce a cytotoxic elimination of cells that express the antigen.

[0547] Introducing a miR-142 binding site into the 5′UTR and/or 3′UTR of a polynucleotide of the invention can selectively repress gene expression in antigen presenting cells through miR-142 mediated degradation, limiting antigen presentation in antigen presenting cells (e.g., dendritic cells) and thereby preventing antigen-mediated immune response after the delivery of the polynucleotide. The polynucleotide is then stably expressed in target tissues or cells without triggering cytotoxic elimination.

[0548] In one embodiment, binding sites for miRNAs that are known to be expressed in immune cells, in particular, antigen presenting cells, can be engineered into a polynucleotide of the invention to suppress the expression of the polynucleotide in antigen presenting cells through miRNA mediated RNA degradation, subduing the antigen-mediated immune response. Expression of the polynucleotide is maintained in non-immune cells where the immune cell specific miRNAs are not expressed. For example, in some embodiments, to prevent an immunogenic reaction against a liver specific protein, any miR-122 binding site can be removed and a miR-142 (and/or mirR-146) binding site can be engineered into the 5′UTR and/or 3′UTR of a polynucleotide of the invention.

[0549] To further drive the selective degradation and suppression in APCs and macrophage, a polynucleotide of the invention can include a further negative regulatory element in the 5′UTR and/or 3′UTR, either alone or in combination with miR-142 and/or miR-146 binding sites. As a non-limiting example, the further negative regulatory element is a Constitutive Decay Element (CDE).

[0550] Immune cell specific miRNAs include, but are not limited to, hsa-let-7a-2-3p, hsa-let-7a-3p, hsa-7a-5p, hsa-let-7c, hsa-let-7e-3p, hsa-let-7e-5p, hsa-let-7g-3p, hsa-let-7g-5p, hsa-let-7i-3p, hsa-let-7i-5p, miR-10a-3p, miR-10a-5p, miR-1184, hsa-let-7f-1-3p, hsa-let-7f-2-5p, hsa-let-7f-5p, miR-125b-1-3p, miR-125b-2-3p, miR-125b-5p, miR-1279, miR-130a-3p, miR-130a-5p, miR-132-3p, miR-132-5p, miR-142-3p, miR-142-5p, miR-143-3p, miR-143-5p, miR-146a-3p, miR-146a-5p, miR-146b-3p, miR-146b-5p, miR-147a, miR-147b, miR-148a-5p, miR-148a-3p, miR-150-3p, miR-150-5p, miR-151b, miR-155-3p, miR-155-5p, miR-15a-3p, miR-15a-5p, miR-15b-5p, miR-15b-3p, miR-16-1-3p, miR-16-2-3p, miR-16-5p, miR-17-5p, miR-181a-3p, miR-181a-5p, miR-181a-2-3p, miR-182-3p, miR-182-5p, miR-197-3p, miR-197-5p, miR-21-5p, miR-21-3p, miR-214-3p, miR-214-5p, miR-223-3p, miR-223-5p, miR-221-3p, miR-221-5p, miR-23b-3p, miR-23b-5p, miR-24-1-5p, miR-24-2-5p, miR-24-3p, miR-26a-1-3p, miR-26a-2-3p, miR-26a-5p, miR-26b-3p, miR-26b-5p, miR-27a-3p, miR-27a-5p, miR-27b-3p, miR-27b-5p, miR-28-3p, miR-28-5p, miR-2909, miR-29a-3p, miR-29a-5p, miR-29b-1-5p, miR-29b-2-5p, miR-29c-3p, miR-29c-5p, miR-30e-3p, miR-30e-5p, miR-331-5p, miR-339-3p, miR-339-5p, miR-345-3p, miR-345-5p, miR-346, miR-34a-3p, miR-34a-5p, miR-363-3p, miR-363-5p, miR-372, miR-377-3p, miR-377-5p, miR-493-3p, miR-493-5p, miR-542, miR-548b-5p, miR548c-5p, miR-548i, miR-548j, miR-548n, miR-574-3p, miR-598, miR-718, miR-935, miR-99a-3p, miR-99a-5p, miR-99b-3p, and miR-99b-5p. Furthermore, novel miRNAs can be identified in immune cell through micro-array hybridization and microtome analysis (e.g., Jima D D et al, Blood, 2010, 116:e118-e127; Vaz C et al., BMC Genomics, 2010, 11,288, the content of each of which is incorporated herein by reference in its entirety.)

[0551] miRNAs that are known to be expressed in the liver include, but are not limited to, miR-107, miR-122-3p, miR-122-5p, miR-1228-3p, miR-1228-5p, miR-1249, miR-129-5p, miR-1303, miR-151a-3p, miR-151a-5p, miR-152, miR-194-3p, miR-194-5p, miR-199a-3p, miR-199a-5p, miR-199b-3p, miR-199b-5p, miR-296-5p, miR-557, miR-581, miR-939-3p, and miR-939-5p. MiRNA binding sites from any liver specific miRNA can be introduced to or removed from a polynucleotide of the invention to regulate expression of the polynucleotide in the liver. Liver specific miRNA binding sites can be engineered alone or further in combination with immune cell (e.g., APC) miRNA binding sites in a polynucleotide of the invention.

[0552] miRNAs that are known to be expressed in the lung include, but are not limited to, let-7a-2-3p, let-7a-3p, let-7a-5p, miR-126-3p, miR-126-5p, miR-127-3p, miR-127-5p, miR-130a-3p, miR-130a-5p, miR-130b-3p, miR-130b-5p, miR-133a, miR-133b, miR-134, miR-18a-3p, miR-18a-5p, miR-18b-3p, miR-18b-5p, miR-24-1-5p, miR-24-2-5p, miR-24-3p, miR-296-3p, miR-296-5p, miR-32-3p, miR-337-3p, miR-337-5p, miR-381-3p, and miR-381-5p. miRNA binding sites from any lung specific miRNA can be introduced to or removed from a polynucleotide of the invention to regulate expression of the polynucleotide in the lung. Lung specific miRNA binding sites can be engineered alone or further in combination with immune cell (e.g., APC) miRNA binding sites in a polynucleotide of the invention.

[0553] miRNAs that are known to be expressed in the heart include, but are not limited to, miR-1, miR-133a, miR-133b, miR-149-3p, miR-149-5p, miR-186-3p, miR-186-5p, miR-208a, miR-208b, miR-210, miR-296-3p, miR-320, miR-451a, miR-451b, miR-499a-3p, miR-499a-5p, miR-499b-3p, miR-499b-5p, miR-744-3p, miR-744-5p, miR-92b-3p, and miR-92b-5p.

[0554] miRNA binding sites from any heart specific microRNA can be introduced to or removed from a polynucleotide of the invention to regulate expression of the polynucleotide in the heart. Heart specific miRNA binding sites can be engineered alone or further in combination with immune cell (e.g., APC) miRNA binding sites in a polynucleotide of the invention.

[0555] miRNAs that are known to be expressed in the nervous system include, but are not limited to, miR-124-5p, miR-125a-3p, miR-125a-5p, miR-125b-1-3p, miR-125b-2-3p, miR-125b-5p, miR-1271-3p, miR-1271-5p, miR-128, miR-132-5p, miR-135a-3p, miR-135a-5p, miR-135b-3p, miR-135b-5p, miR-137, miR-139-5p, miR-139-3p, miR-149-3p, miR-149-5p, miR-153, miR-181c-3p, miR-181c-5p, miR-183-3p, miR-183-5p, miR-190a, miR-190b, miR-212-3p, miR-212-5p, miR-219-1-3p, miR-219-2-3p, miR-23a-3p, miR-23a-5p, miR-30a-5p, miR-30b-3p, miR-30b-5p, miR-30c-1-3p, miR-30c-2-3p, miR-30c-5p, miR-30d-3p, miR-30d-5p, miR-329, miR-342-3p, miR-3665, miR-3666, miR-380-3p, miR-380-5p, miR-383, miR-410, miR-425-3p, miR-425-5p, miR-454-3p, miR-454-5p, miR-483, miR-510, miR-516a-3p, miR-548b-5p, miR-548c-5p, miR-571, miR-7-1-3p, miR-7-2-3p, miR-7-5p, miR-802, miR-922, miR-9-3p, and miR-9-5p.

[0556] miRNAs enriched in the nervous system further include those specifically expressed in neurons, including, but not limited to, miR-132-3p, miR-132-3p, miR-148b-3p, miR-148b-5p, miR-151a-3p, miR-151a-5p, miR-212-3p, miR-212-5p, miR-320b, miR-320e, miR-323a-3p, miR-323a-5p, miR-324-5p, miR-325, miR-326, miR-328, miR-922 and those specifically expressed in glial cells, including, but not limited to, miR-1250, miR-219-1-3p, miR-219-2-3p, miR-219-5p, miR-23a-3p, miR-23a-5p, miR-3065-3p, miR-3065-5p, miR-30e-3p, miR-30e-5p, miR-32-5p, miR-338-5p, and miR-657. miRNA binding sites from any CNS specific miRNA can be introduced to or removed from a polynucleotide of the invention to regulate expression of the polynucleotide in the nervous system. Nervous system specific miRNA binding sites can be engineered alone or further in combination with immune cell (e.g., APC) miRNA binding sites in a polynucleotide of the invention.

[0557] miRNAs that are known to be expressed in the pancreas include, but are not limited to, miR-105-3p, miR-105-5p, miR-184, miR-195-3p, miR-195-5p, miR-196a-3p, miR-196a-5p, miR-214-3p, miR-214-5p, miR-216a-3p, miR-216a-5p, miR-30a-3p, miR-33a-3p, miR-33a-5p, miR-375, miR-7-1-3p, miR-7-2-3p, miR-493-3p, miR-493-5p, and miR-944.

[0558] MiRNA binding sites from any pancreas specific miRNA can be introduced to or removed from a polynucleotide of the invention to regulate expression of the polynucleotide in the pancreas. Pancreas specific miRNA binding sites can be engineered alone or further in combination with immune cell (e.g. APC) miRNA binding sites in a polynucleotide of the invention.

[0559] miRNAs that are known to be expressed in the kidney include, but are not limited to, miR-122-3p, miR-145-5p, miR-17-5p, miR-192-3p, miR-192-5p, miR-194-3p, miR-194-5p, miR-20a-3p, miR-20a-5p, miR-204-3p, miR-204-5p, miR-210, miR-216a-3p, miR-216a-5p, miR-296-3p, miR-30a-3p, miR-30a-5p, miR-30b-3p, miR-30b-5p, miR-30c-1-3p, miR-30c-2-3p, miR30c-5p, miR-324-3p, miR-335-3p, miR-335-5p, miR-363-3p, miR-363-5p, and miR-562.

[0560] miRNA binding sites from any kidney specific miRNA can be introduced to or removed from a polynucleotide of the invention to regulate expression of the polynucleotide in the kidney. Kidney specific miRNA binding sites can be engineered alone or further in combination with immune cell (e.g., APC) miRNA binding sites in a polynucleotide of the invention.

[0561] miRNAs that are known to be expressed in the muscle include, but are not limited to, let-7g-3p, let-7g-5p, miR-1, miR-1286, miR-133a, miR-133b, miR-140-3p, miR-143-3p, miR-143-5p, miR-145-3p, miR-145-5p, miR-188-3p, miR-188-5p, miR-206, miR-208a, miR-208b, miR-25-3p, and miR-25-5p. MiRNA binding sites from any muscle specific miRNA can be introduced to or removed from a polynucleotide of the invention to regulate expression of the polynucleotide in the muscle. Muscle specific miRNA binding sites can be engineered alone or further in combination with immune cell (e.g., APC) miRNA binding sites in a polynucleotide of the invention.

[0562] miRNAs are also differentially expressed in different types of cells, such as, but not limited to, endothelial cells, epithelial cells, and adipocytes.

[0563] miRNAs that are known to be expressed in endothelial cells include, but are not limited to, let-7b-3p, let-7b-5p, miR-100-3p, miR-100-5p, miR-101-3p, miR-101-5p, miR-126-3p, miR-126-5p, miR-1236-3p, miR-1236-5p, miR-130a-3p, miR-130a-5p, miR-17-5p, miR-17-3p, miR-18a-3p, miR-18a-5p, miR-19a-3p, miR-19a-5p, miR-19b-1-5p, miR-19b-2-5p, miR-19b-3p, miR-20a-3p, miR-20a-5p, miR-217, miR-210, miR-21-3p, miR-21-5p, miR-221-3p, miR-221-5p, miR-222-3p, miR-222-5p, miR-23a-3p, miR-23a-5p, miR-296-5p, miR-361-3p, miR-361-5p, miR-421, miR-424-3p, miR-424-5p, miR-513a-5p, miR-92a-1-5p, miR-92a-2-5p, miR-92a-3p, miR-92b-3p, and miR-92b-5p. Many novel miRNAs are discovered in endothelial cells from deep-sequencing analysis (e.g., Voellenkle C et al., RNA, 2012, 18, 472-484, herein incorporated by reference in its entirety). miRNA binding sites from any endothelial cell specific.

[0564] miRNA can be introduced to or removed from a polynucleotide of the invention to regulate expression of the polynucleotide in the endothelial cells.

[0565] miRNAs that are known to be expressed in epithelial cells include, but are not limited to, let-7b-3p, let-7b-5p, miR-1246, miR-200a-3p, miR-200a-5p, miR-200b-3p, miR-200b-5p, miR-200c-3p, miR-200c-5p, miR-338-3p, miR-429, miR-451a, miR-451b, miR-494, miR-802 and miR-34a, miR-34b-5p, miR-34c-5p, miR-449a, miR-449b-3p, miR-449b-5p specific in respiratory ciliated epithelial cells, let-7 family, miR-133a, miR-133b, miR-126 specific in lung epithelial cells, miR-382-3p, miR-382-5p specific in renal epithelial cells, and miR-762 specific in corneal epithelial cells. miRNA binding sites from any epithelial cell specific miRNA can be introduced to or removed from a polynucleotide of the invention to regulate expression of the polynucleotide in the epithelial cells.

[0566] In addition, a large group of miRNAs are enriched in embryonic stem cells, controlling stem cell self-renewal as well as the development and/or differentiation of various cell lineages, such as neural cells, cardiac, hematopoietic cells, skin cells, osteogenic cells and muscle cells (e.g., Kuppusamy K T et al., Curr. Mol Med, 2013, 13(5), 757-764; Vidigal J A and Ventura A, Semin Cancer Biol. 2012, 22(5-6), 428-436; Goff L A et al., PLoS One, 2009, 4:e7192; Morin R D et al., Genome Res, 2008, 18, 610-621; Yoo J K et al., Stem Cells Dev. 2012, 21(11), 2049-2057, each of which is herein incorporated by reference in its entirety). MiRNAs abundant in embryonic stem cells include, but are not limited to, let-7a-2-3p, let-a-3p, let-7a-5p, let7d-3p, let-7d-5p, miR-103a-2-3p, miR-103a-5p, miR-106b-3p, miR-106b-5p, miR-1246, miR-1275, miR-138-1-3p, miR-138-2-3p, miR-138-5p, miR-154-3p, miR-154-5p, miR-200c-3p, miR-200c-5p, miR-290, miR-301a-3p, miR-301a-5p, miR-302a-3p, miR-302a-5p, miR-302b-3p, miR-302b-5p, miR-302c-3p, miR-302c-5p, miR-302d-3p, miR-302d-5p, miR-302e, miR-367-3p, miR-367-5p, miR-369-3p, miR-369-5p, miR-370, miR-371, miR-373, miR-380-5p, miR-423-3p, miR-423-5p, miR-486-5p, miR-520c-3p, miR-548e, miR-548f, miR-548g-3p, miR-548g-5p, miR-548i, miR-548k, miR-5481, miR-548m, miR-548n, miR-548o-3p, miR-548o-5p, miR-548p, miR-664a-3p, miR-664a-5p, miR-664b-3p, miR-664b-5p, miR-766-3p, miR-766-5p, miR-885-3p, miR-885-5p, miR-93-3p, miR-93-5p, miR-941, miR-96-3p, miR-96-5p, miR-99b-3p and miR-99b-5p. Many predicted novel miRNAs are discovered by deep sequencing in human embryonic stem cells (e.g., Morin R D et al., Genome Res, 2008, 18, 610-621; Goff L A et al., PLoS One, 2009, 4:e7192; Bar M et al., Stem cells, 2008, 26, 2496-2505, the content of each of which is incorporated herein by reference in its entirety).

[0567] In one embodiment, the binding sites of embryonic stem cell specific miRNAs can be included in or removed from the 3′UTR of a polynucleotide of the invention to modulate the development and/or differentiation of embryonic stem cells, to inhibit the senescence of stem cells in a degenerative condition (e.g. degenerative diseases), or to stimulate the senescence and apoptosis of stem cells in a disease condition (e.g. cancer stem cells).

[0568] Many miRNA expression studies are conducted to profile the differential expression of miRNAs in various cancer cells/tissues and other diseases. Some miRNAs are abnormally over-expressed in certain cancer cells and others are under-expressed. For example, miRNAs are differentially expressed in cancer cells (WO2008/154098, US2013/0059015, US2013/0042333, WO2011/157294); cancer stem cells (US2012/0053224); pancreatic cancers and diseases (US2009/0131348, US2011/0171646, US2010/0286232, U.S. Pat. No. 8,389,210); asthma and inflammation (U.S. Pat. No. 8,415,096); prostate cancer (US2013/0053264); hepatocellular carcinoma (WO2012/151212, US2012/0329672, WO2008/054828, U.S. Pat. No. 8,252,538); lung cancer cells (WO2011/076143, WO2013/033640, WO2009/070653, US2010/0323357); cutaneous T cell lymphoma (WO2013/011378); colorectal cancer cells (WO2011/0281756, WO2011/076142); cancer positive lymph nodes (WO2009/100430, US2009/0263803); nasopharyngeal carcinoma (EP2112235); chronic obstructive pulmonary disease (US2012/0264626, US2013/0053263); thyroid cancer (WO2013/066678); ovarian cancer cells (US2012/0309645, WO2011/095623); breast cancer cells (WO2008/154098, WO2007/081740, US2012/0214699), leukemia and lymphoma (WO2008/073915, US2009/0092974, US2012/0316081, US2012/0283310, WO2010/018563, the content of each of which is incorporated herein by reference in its entirety.)

[0569] As a non-limiting example, miRNA binding sites for miRNAs that are over-expressed in certain cancer and/or tumor cells can be removed from the 3′UTR of a polynucleotide of the invention, restoring the expression suppressed by the over-expressed miRNAs in cancer cells, thus ameliorating the corresponsive biological function, for instance, transcription stimulation and/or repression, cell cycle arrest, apoptosis and cell death. Normal cells and tissues, wherein miRNAs expression is not up-regulated, will remain unaffected.

[0570] miRNA can also regulate complex biological processes such as angiogenesis (e.g., miR-132) (Anand and Cheresh Curr Opin Hematol 2011 18:171-176). In the polynucleotides of the invention, miRNA binding sites that are involved in such processes can be removed or introduced, in order to tailor the expression of the polynucleotides to biologically relevant cell types or relevant biological processes. In this context, the polynucleotides of the invention are defined as auxotrophic polynucleotides.

[0571] In some embodiments, the therapeutic window and/or differential expression (e.g., tissue-specific expression) of a polypeptide of the invention (e.g., one or more BH3 domains or a Bcl-2-like polypeptide) may be altered by incorporation of a miRNA binding site into an mRNA encoding the polypeptide. In one example, an mRNA may include one or more miRNA binding sites that are bound by miRNAs that have higher expression in one tissue type as compared to another. In another example, an mRNA may include one or more miRNA binding sites that are bound by miRNAs that have lower expression in a cancer cell as compared to a non-cancerous cell of the same tissue of origin. When present in a cancer cell that expresses low levels of such an miRNA, the polypeptide encoded by the mRNA typically will show increased expression. If the polypeptide is able to induce apoptosis, for example, by inhibiting an anti-apoptotic Bcl-2 family member and/or by activating a pro-apoptotic Bcl-2 family member, this may result in preferential cell killing of cancer cells as compared to normal cells.

[0572] Liver cancer cells (e.g., hepatocellular carcinoma cells) typically express low levels of miR-122 as compared to normal liver cells. Therefore, an mRNA encoding a polypeptide (e.g., an mRNA encoding one or more BH3 domains) that includes at least one miR-122 binding site (e.g., in the 3′-UTR of the mRNA) will typically express comparatively low levels of the polypeptide in normal liver cells and comparatively high levels of the polypeptide in liver cancer cells. If the polypeptide is able to induce apoptosis (such as one or more BH3 domains, as described herein), this can cause preferential cell killing of liver cancer cells (e.g., hepatocellular carcinoma cells) as compared to normal liver cells.

[0573] Liver cancer cells (e.g., hepatocellular carcinoma cells) typically express high levels of miR-21 as compared to normal liver cells. Therefore, an mRNA encoding a polypeptide (e.g., a Bcl-2-like polypeptide) that includes at least one miR-21 binding site (e.g., in the 3′-UTR of the mRNA) will typically express comparatively high levels of the polypeptide in normal liver cells and comparatively low levels of the polypeptide in liver cancer cells. If the polypeptide is able to inhibit apoptosis (e.g., by inhibiting activity of one or more BH3 domains, as described herein), this can further cause preferential cell killing of liver cancer cells (e.g., hepatocellular carcinoma cells) as compared to normal liver cells. For example, in normal liver cells, the Bcl-2-like-polypeptide (or BH3-trap) will be expressed and inhibit apoptosis induced by the BH3 domain(s) expressed in the normal liver cells.

[0574] In particular embodiments, the present invention contemplates the use of two or more mRNAs, wherein the first mRNA encodes one or more BH3 domains and the second mRNA encodes an inhibitor of the Bh3 domain(s) (e.g., referred to as a BH3-trap polypeptide), such as a Bcl-2-like polypeptide, or a variant or fragment thereof. In particular embodiments, when expressed in the same cell, the BH3-trap polypeptide binds the BH3 domain(s), thus preventing it from binding or inhibiting anti-apoptotic Bcl-2 family proteins present in the cell. In particular embodiments, the first mRNA encoding the BH3 domain(s) comprises one or more regulatory sequences to enhance expression in cancer cells as compared to normal cells. In particular embodiments, the second mRNA encoding the BH3-trap polypeptide comprises one or more regulatory sequences to reduce expression in cancer cells as compared to normal cells. In particular embodiments, the first mRNA comprises at least one first microRNA binding site, wherein the cognate microRNA that binds the first microRNA binding site is preferentially expressed in normal cells as compared to cancer cells. In particular embodiments, the second mRNA comprises at least one second microRNA binding site, wherein the cognate microRNA that binds the second microRNA binding site is preferentially expressed in cancer cells as compared to normal cells. Thus, the expression of the BH3 domain(s), which induces apoptosis, is increased in cancer cells as compared to normal cells, and the expression of the BH3-trap polypeptide that inhibits BH3-induced apoptosis is increased in normal cells as compared to cancer cells, thus specifically targeting cancer cells for apoptosis. In certain embodiments, the first microRNA binding site is a miR-122 binding site, and the second microRNA binding site is a miR-21 binding site. In certain instances, the present invention contemplates the use of a first mRNA that encodes one or more BH3 domains, wherein this first mRNA contains one or more miR-122 binding sites, and a second mRNA that encodes a BH3-trap polypeptide, e.g., a Bcl-2-like polypeptide, where this second mRNA contains one or more miR-21 binding sites.

[0575] As a non-limiting example, mRNAs of the invention (e.g., those encoding one or more BH3 domains) may include at least one miR-122 binding site. For example, a mRNA of the invention may include a miR-122 binding site that includes a sequence with partial or complete complementarity with a miR-122 seed sequence. In some embodiments, a miR-122 seed sequence may correspond to nucleotides 2-7 of a miR-122. In some embodiments, a miR-122 seed sequence may be 5′-GGAGUG-3′. In some embodiments, a miR-122 seed sequence may be nucleotides 2-8 of a miR-122. In some embodiments, a miR-122 seed sequence may be 5′-GGAGUGU-3′. In some embodiments, the miR-122 binding site includes a nucleotide sequence of 5′-UAUUUAGUGUGAUAAUGGCGUU-3′ (SEQ ID NO: 31) or 5′-CAAACACCAUUGUCACACUCCA-3′ (SEQ ID NO: 32) or a complement thereof. In some embodiments, inclusion of at least one miR-122 binding site in an mRNA may dampen expression of a polypeptide encoded by the mRNA in a normal liver cell as compared to other cell types that express low levels of miR-122. In other embodiments, inclusion of at least one miR-122 binding site in an mRNA may allow increased expression of a polypeptide encoded by the mRNA in a liver cancer cell (e.g., a hepatocellular carcinoma cell) as compared to a normal liver cell. In some embodiments, an mRNA that encodes one or more BH3 domains contains one or more miR-122 binding sites.

[0576] As a further non-limiting example, mRNAs of the invention, e.g., those encoding BH3-trap polypeptides, such as a Bcl-2-like polypeptide may include at least one miR-21 binding site. For example, an mRNA of the invention may include a miR-21 binding site that includes a sequence with partial or complete complementarity with a miR-21 seed sequence. In some embodiments, a miR-21 sequence may be 5′-UAGCUUAUCAGACUGAUGUUGA-3′ (SEQ ID NO: 33) or 5′-CAACACCAGUCGAUGGGCUGU-3′ (SEQ ID NO: 34) or a complement thereof. In some embodiments, a miR-21 seed sequence may correspond to nucleotides 1-8 or 2-8 of a miR-21. In some embodiments, a miR-21 seed sequence may be 5′-UAGCUUAU-3′ or 5′-AGCUUAU-3′ or a complement thereof. In other embodiments, a miR-21 seed has the sequence shown in SEQ ID NO: 106.

[0577] In some embodiments, inclusion of at least one miR-21 binding site in an mRNA may increase expression of a polypeptide encoded by the mRNA in a normal liver cell as compared to other cell types that express low levels of miR-21, such as liver cancer cells. In other embodiments, inclusion of at least one miR-21 binding site in an mRNA may allow reduced expression of a polypeptide encoded by the mRNA in a liver cancer cell (e.g., a hepatocellular carcinoma cell) as compared to a normal liver cell. In some embodiments, an mRNA that encodes a BH3-trap polypeptide (e.g., a Bcl-2-like polypeptide or variant there) contains one or more miR-21 binding sites.

[0578] In some embodiments, a polynucleotide of the invention comprises a miRNA binding site, wherein the miRNA binding site comprises one or more nucleotide sequences selected from Table 14, including one or more copies of any one or more of the miRNA binding site sequences. In some embodiments, a polynucleotide of the invention further comprises at least one, two, three, four, five, six, seven, eight, nine, ten, or more of the same or different miRNA binding sites selected from Table 14, including any combination thereof. In some embodiments, the miRNA binding site binds to miR-142 or is complementary to miR-142. In some embodiments, the miR-142 comprises SEQ ID NO: 297. In some embodiments, the miRNA binding site binds to miR-142-3p or miR-142-5p. In some embodiments the miR-142-3p comprises SEQ ID NO: 295. In some embodiments, the miR-142-5p comprises SEQ ID NO: 296. In some embodiments, the miRNA binding site comprises a nucleotide sequence at least 80%, at least 85%, at least 90%, at least 95%, or 100% identical to any of the sequences in Table 14.

TABLE 14
miR-142 Binding Sites

| SEQ ID NO. | Description | Sequence |
|---|---|---|
| 297 | miR-142 | GACAGUGCAGUCACCCAUAAAGU |
| | | AGAAAGCACUACUAACAGCACUG |
| | | GAGGGUGUAGUGUUUCCUACUU |
| | | UAUGGAUGAGUGUACUGUG |
| 295 | miR-142-3p | UGUAGUGUUUCCUACUUUAUGG |
| | | A |
| 298 | miR-142-3p | UCCAUAAAGUAGGAAACACUACA |
| | binding site | |
| 296 | miR-142-5p | CAUAAAGUAGAAAGCACUACU |
| 299 | miR-142-5p | AGUAGUGCUUUCUACUUUAUG |
| | binding site | |

[0579] In some embodiments, a miRNA binding site is inserted in the polynucleotide of the invention in any position of the polynucleotide (e.g., the 5′UTR and/or 3′UTR). In some embodiments, the 5′UTR comprises a miRNA binding site. In some embodiments, the 3′UTR comprises a miRNA binding site. In some embodiments, the 5′UTR and the 3′UTR comprise a miRNA binding site. The insertion site in the polynucleotide can be anywhere in the polynucleotide as long as the insertion of the miRNA binding site in the polynucleotide does not interfere with the translation of a functional polypeptide in the absence of the corresponding miRNA; and in the presence of the miRNA, the insertion of the miRNA binding site in the polynucleotide and the binding of the miRNA binding site to the corresponding miRNA are capable of degrading the polynucleotide or preventing the translation of the polynucleotide.

[0580] In some embodiments, a miRNA binding site is inserted in at least about 30 nucleotides downstream from the stop codon of an ORF in a polynucleotide of the invention comprising the ORF. In some embodiments, a miRNA binding site is inserted in at least about 10 nucleotides, at least about 15 nucleotides, at least about 20 nucleotides, at least about 25 nucleotides, at least about 30 nucleotides, at least about 35 nucleotides, at least about 40 nucleotides, at least about 45 nucleotides, at least about 50 nucleotides, at least about 55 nucleotides, at least about 60 nucleotides, at least about 65 nucleotides, at least about 70 nucleotides, at least about 75 nucleotides, at least about 80 nucleotides, at least about 85 nucleotides, at least about 90 nucleotides, at least about 95 nucleotides, or at least about 100 nucleotides downstream from the stop codon of an ORF in a polynucleotide of the invention. In some embodiments, a miRNA binding site is inserted in about 10 nucleotides to about 100 nucleotides, about 20 nucleotides to about 90 nucleotides, about 30 nucleotides to about 80 nucleotides, about 40 nucleotides to about 70 nucleotides, about 50 nucleotides to about 60 nucleotides, about 45 nucleotides to about 65 nucleotides downstream from the stop codon of an ORF in a polynucleotide of the invention.

[0581] miRNA gene regulation can be influenced by the sequence surrounding the miRNA such as, but not limited to, the species of the surrounding sequence, the type of sequence (e.g., heterologous, homologous, exogenous, endogenous, or artificial), regulatory elements in the surrounding sequence and/or structural elements in the surrounding sequence. The miRNA can be influenced by the 5′UTR and/or 3′UTR. As a non-limiting example, a non-human 3′UTR can increase the regulatory effect of the miRNA sequence on the expression of a polypeptide of interest compared to a human 3′UTR of the same sequence type.

[0582] In one embodiment, other regulatory elements and/or structural elements of the 5′UTR can influence miRNA mediated gene regulation. One example of a regulatory element and/or structural element is a structured IRES (Internal Ribosome Entry Site) in the 5′UTR, which is necessary for the binding of translational elongation factors to initiate protein translation. EIF4A2 binding to this secondarily structured element in the 5′-UTR is necessary for miRNA mediated gene expression (Meijer H A et al., Science, 2013, 340, 82-85, herein incorporated by reference in its entirety). The polynucleotides of the invention can further include this structured 5′UTR in order to enhance microRNA mediated gene regulation.

[0583] At least one miRNA binding site can be engineered into the 3′UTR of a polynucleotide of the invention. In this context, at least two, at least three, at least four, at least five, at least six, at least seven, at least eight, at least nine, at least ten, or more miRNA binding sites can be engineered into a 3′UTR of a polynucleotide of the invention. For example, 1 to 10, 1 to 9, 1 to 8, 1 to 7, 1 to 6, 1 to 5, 1 to 4, 1 to 3, 2, or 1 miRNA binding sites can be engineered into the 3′UTR of a polynucleotide of the invention. In one embodiment, miRNA binding sites incorporated into a polynucleotide of the invention can be the same or can be different miRNA sites. A combination of different miRNA binding sites incorporated into a polynucleotide of the invention can include combinations in which more than one copy of any of the different miRNA sites are incorporated. In another embodiment, miRNA binding sites incorporated into a polynucleotide of the invention can target the same or different tissues in the body. As a non-limiting example, through the introduction of tissue-, cell-type-, or disease-specific miRNA binding sites in the 3′-UTR of a polynucleotide of the invention, the degree of expression in specific cell types (e.g., hepatocytes, myeloid cells, endothelial cells, cancer cells, etc.) can be reduced.

[0584] In one embodiment, a miRNA binding site can be engineered near the 5′ terminus of the 3′UTR, about halfway between the 5′ terminus and 3′ terminus of the 3′UTR and/or near the 3′ terminus of the 3′UTR in a polynucleotide of the invention. As a non-limiting example, a miRNA binding site can be engineered near the 5′ terminus of the 3′UTR and about halfway between the 5′ terminus and 3′ terminus of the 3′UTR. As another non-limiting example, a miRNA binding site can be engineered near the 3′ terminus of the 3′UTR and about halfway between the 5′ terminus and 3′ terminus of the 3′UTR. As yet another non-limiting example, a miRNA binding site can be engineered near the 5′ terminus of the 3′UTR and near the 3′ terminus of the 3′UTR.

[0585] In another embodiment, a 3′UTR can comprise 1, 2, 3, 4, 5, 6, 7, 8, 9, or 10 miRNA binding sites. The miRNA binding sites can be complementary to a miRNA, miRNA seed sequence, and/or miRNA sequences flanking the seed sequence.

[0586] In one embodiment, a polynucleotide of the invention can be engineered to include more than one miRNA site expressed in different tissues or different cell types of a subject. As a non-limiting example, a polynucleotide of the invention can be engineered to include miR-192 and miR-122 to regulate expression of the polynucleotide in the liver and kidneys of a subject. In another embodiment, a polynucleotide of the invention can be engineered to include more than one miRNA site for the same tissue.

[0587] In some embodiments, the therapeutic window and or differential expression associated with the polypeptide encoded by a polynucleotide of the invention can be altered with a miRNA binding site. For example, a polynucleotide encoding a polypeptide that provides a death signal can be designed to be more highly expressed in cancer cells by virtue of the miRNA signature of those cells. Where a cancer cell expresses a lower level of a particular miRNA, the polynucleotide encoding the binding site for that miRNA (or miRNAs) would be more highly expressed. Hence, the polypeptide that provides a death signal triggers or induces cell death in the cancer cell. Neighboring noncancer cells, harboring a higher expression of the same miRNA would be less affected by the encoded death signal as the polynucleotide would be expressed at a lower level due to the effects of the miRNA binding to the binding site or “sensor” encoded in the 3′UTR. Conversely, cell survival or cytoprotective signals can be delivered to tissues containing cancer and non-cancerous cells where a miRNA has a higher expression in the cancer cells—the result being a lower survival signal to the cancer cell and a larger survival signal to the normal cell.

[0588] Multiple polynucleotides can be designed and administered having different signals based on the use of miRNA binding sites as described herein.

[0589] In some embodiments, the expression of a polynucleotide of the invention can be controlled by incorporating at least one sensor sequence in the polynucleotide and formulating the polynucleotide for administration. As a non-limiting example, a polynucleotide of the invention can be targeted to a tissue or cell by incorporating a miRNA binding site and formulating the polynucleotide in a lipid nanoparticle comprising a cationic lipid, including any of the lipids described herein.

[0590] A polynucleotide of the invention can be engineered for more targeted expression in specific tissues, cell types, or biological conditions based on the expression patterns of miRNAs in the different tissues, cell types, or biological conditions. Through introduction of tissue-specific miRNA binding sites, a polynucleotide of the invention can be designed for optimal protein expression in a tissue or cell, or in the context of a biological condition.

[0591] In some embodiments, a polynucleotide of the invention can be designed to incorporate miRNA binding sites that either have 100% identity to known miRNA seed sequences or have less than 100% identity to miRNA seed sequences. In some embodiments, a polynucleotide of the invention can be designed to incorporate miRNA binding sites that have at least: 60%, 65%, 70%, 75%, 80%, 85%, 90%, 95%, 96%, 97%, 98%, or 99% identity to known miRNA seed sequences. The miRNA seed sequence can be partially mutated to decrease miRNA binding affinity and as such result in reduced downmodulation of the polynucleotide. In essence, the degree of match or mis-match between the miRNA binding site and the miRNA seed can act as a rheostat to more finely tune the ability of the miRNA to modulate protein expression. In addition, mutation in the non-seed region of a miRNA binding site can also impact the ability of a miRNA to modulate protein expression.

[0592] In one embodiment, a miRNA sequence can be incorporated into the loop of a stem loop.

[0593] In another embodiment, a miRNA seed sequence can be incorporated in the loop of a stem loop and a miRNA binding site can be incorporated into the 5′ or 3′ stem of the stem loop.

[0594] In one embodiment, a translation enhancer element (TEE) can be incorporated on the 5′end of the stem of a stem loop and a miRNA seed can be incorporated into the stem of the stem loop. In another embodiment, a TEE can be incorporated on the 5′ end of the stem of a stem loop, a miRNA seed can be incorporated into the stem of the stem loop and a miRNA binding site can be incorporated into the 3′ end of the stem or the sequence after the stem loop. The miRNA seed and the miRNA binding site can be for the same and/or different miRNA sequences.

[0595] In one embodiment, the incorporation of a miRNA sequence and/or a TEE sequence changes the shape of the stem loop region which can increase and/or decrease translation. (see e.g, Kedde et al., “A Pumilio-induced RNA structure switch in p27-3′UTR controls miR-221 and miR-22 accessibility.” Nature Cell Biology. 2010, incorporated herein by reference in its entirety).

[0596] In one embodiment, the 5′-UTR of a polynucleotide of the invention can comprise at least one miRNA sequence. The miRNA sequence can be, but is not limited to, a 19 or 22 nucleotide sequence and/or a miRNA sequence without the seed.

[0597] In one embodiment the miRNA sequence in the 5′UTR can be used to stabilize a polynucleotide of the invention described herein.

[0598] In another embodiment, a miRNA sequence in the 5′UTR of a polynucleotide of the invention can be used to decrease the accessibility of the site of translation initiation such as, but not limited to a start codon. See, e.g., Matsuda et al., PLoS One. 2010 11(5):e15057; incorporated herein by reference in its entirety, which used antisense locked nucleic acid (LNA) oligonucleotides and exon-junction complexes (EJCs) around a start codon (−4 to +37 where the A of the AUG codons is +1) in order to decrease the accessibility to the first start codon (AUG). Matsuda showed that altering the sequence around the start codon with an LNA or EJC affected the efficiency, length and structural stability of a polynucleotide. A polynucleotide of the invention can comprise a miRNA sequence, instead of the LNA or EJC sequence described by Matsuda et al, near the site of translation initiation in order to decrease the accessibility to the site of translation initiation. The site of translation initiation can be prior to, after or within the miRNA sequence. As a non-limiting example, the site of translation initiation can be located within a miRNA sequence such as a seed sequence or binding site. As another non-limiting example, the site of translation initiation can be located within a miR-122 sequence such as the seed sequence or the mir-122 binding site.

[0599] In some embodiments, a polynucleotide of the invention can include at least one miRNA in order to dampen the antigen presentation by antigen presenting cells. The miRNA can be the complete miRNA sequence, the miRNA seed sequence, the miRNA sequence without the seed, or a combination thereof. As a non-limiting example, a miRNA incorporated into a polynucleotide of the invention can be specific to the hematopoietic system. As another non-limiting example, a miRNA incorporated into a polynucleotide of the invention to dampen antigen presentation is miR-142-3p.

[0600] In some embodiments, a polynucleotide of the invention can include at least one miRNA in order to dampen expression of the encoded polypeptide in a tissue or cell of interest. As a non-limiting example, a polynucleotide of the invention can include at least one miR-122 binding site in order to dampen expression of an encoded polypeptide of interest in the liver. As another non-limiting example a polynucleotide of the invention can include at least one miR-142-3p binding site, miR-142-3p seed sequence, miR-142-3p binding site without the seed, miR-142-5p binding site, miR-142-5p seed sequence, miR-142-5p binding site without the seed, miR-146 binding site, miR-146 seed sequence and/or miR-146 binding site without the seed sequence.

[0601] In some embodiments, a polynucleotide of the invention can comprise at least one miRNA binding site in the 3′UTR in order to selectively degrade mRNA therapeutics in the immune cells to subdue unwanted immunogenic reactions caused by therapeutic delivery. As a non-limiting example, the miRNA binding site can make a polynucleotide of the invention more unstable in antigen presenting cells. Non-limiting examples of these miRNAs include mir-142-5p, mir-142-3p, mir-146a-5p, and mir-146-3p.

[0602] In one embodiment, a polynucleotide of the invention comprises at least one miRNA sequence in a region of the polynucleotide that can interact with a RNA binding protein.

[0603] In some embodiments, the polynucleotide of the invention (e.g., a RNA, e.g., a mRNA) comprising (i) a sequence-optimized nucleotide sequence (e.g., an ORF) encoding a BH3 polypeptide (e.g., the wild-type sequence, functional fragment, or variant thereof) and (ii) a miRNA binding site (e.g., a miRNA binding site that binds to miR-142).

[0604] In some embodiments, the polynucleotide of the invention (e.g., BH3 polynucleotide) comprises a uracil-modified sequence encoding a polypeptide disclosed herein and a miRNA binding site disclosed herein, e.g., a miRNA binding site that binds to miR-142. In some embodiments, the uracil-modified sequence encoding a SteA-BH3 polypeptide comprises at least one chemically modified nucleobase, e.g., 5-methoxyuracil. In some embodiments, at least 95% of a type of nucleobase (e.g., uracil) in a uracil-modified sequence encoding a polypeptide (e.g., BH3) of the invention are modified nucleobases. In some embodiments, at least 95% of uricil in a uracil-modified sequence encoding a polypeptide is 5-methoxyuridine. In some embodiments, the polynucleotide comprising a nucleotide (e.g., BH3) sequence encoding a polypeptide disclosed herein (e.g., BH3) and a miRNA binding site is formulated with a delivery agent, e.g., a compound having the Formula (I), e.g., any of Compounds 1-147.

### Scaffold Polypeptides

[0605] While the mRNA constructs of the invention that encode one or more intracellular binding domains, as described herein, in many embodiments do not also encode a scaffold protein or polypeptide (since such a scaffold is not necessary for function of the domain(s) intracellularly), nevertheless in certain embodiments, an mRNA construct of the invention may encode a fusion polypeptide comprising one or more intracellular binding domains and a scaffold polypeptide. In one embodiment, the scaffold polypeptide comprises a non-antibody scaffold protein which binds to an intracellular target. In one embodiment, the scaffold polypeptide is a fibronectin domain. In another embodiment, the scaffold polypeptide is a Kunitz domain. In another embodiment, the scaffold polypeptide is a transferrin domain. In another embodiment, the scaffold polypeptide is a Stefin A polypeptide, such as a Stefin A (SteA) mutant scaffold polypeptide (described further below).

[0606] In various embodiments, an mRNA of the invention encodes a fusion polypeptide comprising a Stefin A (SteA) scaffold polypeptide, wherein the SteA scaffold polypeptide comprises one or more intracellular binding domains located at the N-terminal insertion site, the loop 1 insertion site and/or the loop 2 insertion site such that the intracellular binding domain(s) are presented on the SteA scaffold polypeptide. Stefin A (also known in the art as cystatin A) is the founding member of the cystatin family of protein inhibitors of cysteine cathepsins, which are lysosomal peptidases of the papain family. The Stefin subgroup of the cystatin family are relatively small (e.g., around 100 amino acid residues long) single domain proteins. SteA is characterized as a monomeric, single chain, single domain polypeptide of 98 amino acids long. The structure of SteA has been solved, enabling rational engineering of the protein to allow for insertion and display of intracellular binding domain amino acid sequences at defined sites. SteA contains a structural loop called “loop 1” at amino acid positions 48-50, inclusive, and a loop called “loop 2” at amino acid positions 71-79, inclusive. Both loop 1 and loop 2 are sandwiched by amino acids that form beta-sheets. Wild-type SteA is considered in the art to have one known biological activity, which is inhibition of cathepsin activity. Wild-type SteA typically interacts with cathepsins using three binding interfaces: the N-terminus, the loop 1 region, and the loop 2 region, with key contacts being made by glycine at position 4, valine at position 48, and lysine at position 73. In some embodiments, a SteA scaffold polypeptide includes one or more mutations that reduces or abrogates cathepsin inhibitory activity.

[0607] In some embodiments, a SteA scaffold polypeptide of the invention is derived from a SteA sequence (for example, a wild-type SteA sequence, for instance, human SteA), or from a derivative of SteA known in the art and/or as described below, for example, any derivative of SteA described in U.S. Pat. Nos. 8,063,019 and 8,853,131, incorporated herein by reference. Non-limiting exemplary SteA scaffold polypeptides which may be used in the compositions and methods of the invention include wild-type SteA (e.g., human SteA), STM (“Stefin A Triple Mutant,” as described, e.g., in U.S. Pat. No. 8,063,019 and in Woodman et al., J. Mol. Biol. 352: 1118-1133, 2005), SQM (“Stefin A Quadruple Mutant,” as described, e.g., in U.S. Pat. No. 8,853,131), SQT (“Stefin A Quadruple Mutant, Tracy,” as described, e.g., in U.S. Pat. No. 8,853,131 and Stadler et al., Protein Eng. Des. Sel. 24(9): 751-763, 2011), and other SteA scaffold polypeptides described in U.S. Pat. No. 8,853,131 and Hoffman et al., Protein Eng. Des. Sel. 23(5): 403-413, 2010, including SDM (“Stefin A Double Mutant”), SUC (“Stefin A Unique C-terminus”), SUM (“Stefin A Unique Middle”), SUN (“Stefin A Unique N-terminus”), or fragments thereof, including SDM-, SDM--, SQM-, SQM--, SUC-, SUC--, SUM-, SUM--, SUN-, SUN--, and SQL.

[0608] The amino acid sequence of wild-type human SteA is:

(SEQ ID NO: 53)
MIPGGLSEAKPATPEIQEIVDKVKPQLEEKTNETYGKLEAVQYKTQVVAG
TNYYIKVRAGDNKYMHLKVFKSLPGQNEDLVLTGYQVDKNKDDELTGF.

[0609] The amino acid sequence of STM is:

(SEQ ID NO: 54)
MIPWGLSEAKPATPEIQEIVDKVKPQLEEKTNETYGKLEAVQYKTQVDAG
TNYYIKVRAGDNKYMHLKVFNGPPGQNEDLVLTGYQVDKNKDDELTGF.

Compared to wild-type SteA, STM contains a G4W mutation, which disrupts the interaction of STM with cathepsins, a V48D mutation that disrupts the interaction of STM with cathepsins and reduces dimer formation through domain swapping, and a mutation to introduce a unique RsrII restriction enzyme site at codons 71-73. In some embodiments, a polynucleotide sequence encoding an intracellular binding domain may be inserted into the RsrII site of STM, thereby introducing an intracellular binding domain amino acid sequence into loop 2.

[0610] An exemplary amino acid sequence of SDM is:

(SEQ ID NO: 55)
MIPGGLSEAKPATPEIQEIVDKVKPQLEEKTNETYGKLEAVQYKTQVLAS
TNYYIKVRAGDNKYMHLKVFNGPPGQNEDLVRSGYQVDKNKDDELTGF.

SDM contains a Leu residue at position 48 as a result of an engineered NheI restriction enzyme site added to the open reading frame at codons 48-50, inclusive, as compared to wild-type SteA or STM. In some embodiments, a polynucleotide sequence encoding an intracellular binding domain may be inserted at the NheI site of SDM, thereby introducing an intracellular binding domain amino acid sequence into loop 1. SDM also contains the sequence Asn-Gly-Pro at positions 71-73 as a result of an engineered RsrII site added to the open reading frame at codons 71-73, inclusive, as compared to wild type SteA and STM. SDM also contains the sequence Arg-Ser at positions 82-83 as a result of an engineered RsrII site added to the open reading frame at codons 82-83, inclusive, as compared to wild type SteA or STM. In some embodiments, a polynucleotide sequence encoding an intracellular binding domain may be inserted between the RsrII sites of SDM, thereby replacing loop 2 with an intracellular binding domain amino acid sequence.

[0611] The amino acid sequence of SQM is:

(SEQ ID NO: 56)
MIPRGLSEAKPATPEIQEIVDKVKPQLEEKTNETYGKLEAVQYKTQVLAS
TNYYIKVRAGDNKYMHLKVFNGPPGQNEDLVRSGYQVDKNKDDELTGF.

SQM contains an Arg residue at position 4 as a result of an engineered AvrII restriction enzyme site added to the open reading frame as compared to STM or wild-type SteA. In some embodiments, a polynucleotide sequence encoding an intracellular binding domain may be inserted at the AvrII site of SQM, thereby introducing an intracellular binding domain amino acid sequence into the N-terminus of SQM. SQM also contains a Leu residue at position 48 as a result of an engineered NheI restriction enzyme site added to the open reading frame at codons 48-50, inclusive, as compared to wild-type SteA or STM. In some embodiments, a polynucleotide sequence encoding an intracellular binding domain may be inserted at the NheI site of SQM, thereby introducing an intracellular binding domain amino acid sequence into loop 1. SQM also contains the sequence Asn-Gly-Pro at positions 71-73 as a result of an engineered RsrII site added to the open reading frame at codons 71-73, inclusive, as compared to wild type SteA and STM. SQM also contains the sequence Arg-Ser at positions 82-83 as a result of an engineered RsrII site added to the open reading frame at codons 82-83, inclusive, as compared to wild type SteA or STM. In some embodiments, a polynucleotide sequence encoding an intracellular binding domain may be inserted between the RsrII sites of SQM, thereby replacing loop 2 with an intracellular binding domain amino acid sequence.

[0612] The amino acid sequence of SUC is:

(SEQ ID NO: 57)
MIPGGLSEAKPATPEIQEIVDKVKPQLEEKTNETYGKLEAVQYKTQVVAG
TNYYIKVRAGDNKYMHLKVFNGPPGQNEDLVRSGYQVDKNKDDELTGF.

SUC also contains the sequence Asn-Gly-Pro at positions 71-73 as a result of an engineered RsrII site added to the open reading frame at codons 71-73, inclusive, as compared to wild type SteA. SUC also contains the sequence Arg-Ser at positions 82-83 as a result of an engineered RsrII site added to the open reading frame at codons 82-83, inclusive, as compared to wild type SteA or STM.

[0613] The amino acid sequence of SUM is:

(SEQ ID NO: 58)
MIPGGLSEAKPATPEIQEIVDKVKPQLEEKTNETYGKLEAVQYKTQVLAS
TNYYIKVRAGDNKYMHLKVFKSLPGQNEDLVLTGYQVDKNKDDELTGF.

SUM contains a Leu residue at position 48 as a result of an engineered NheI restriction enzyme site added to the open reading frame at codons 48-50, inclusive, as compared to wild-type SteA or STM. In some embodiments, a polynucleotide sequence encoding an intracellular binding domain may be inserted at the NheI site of SUM, thereby introducing an intracellular binding domain amino acid sequence into loop 1.

[0614] The amino acid sequence of SUN is:

(SEQ ID NO: 59)
MIPRGLSEAKPATPEIQEIVDKVKPQLEEKTNETYGKLEAVQYKTQVVAG
TNYYIKVRAGDNKYMHLKVFKSLPGQNEDLVLTGYQVDKNKDDELTGF.

SUN contains an Arg residue at position 4 as a result of an engineered AvrII restriction enzyme site added to the open reading frame as compared to STM or wild-type SteA. In some embodiments, a polynucleotide sequence encoding an intracellular binding domain may be inserted into the AvrII site of SUN, thereby introducing an intracellular binding domain amino acid sequence into the N-terminus of SUN.

[0615] The amino acid sequence of SDM- is:

(SEQ ID NO: 60)
MIPGGLSEAKPATPEIQEIVDKVKPQLEEKTNETYGKLEAVQYKTQVL
ASTNYYIKVRAGDNKYMHLKVFNGPPGQNEDLVRS.

[0616] The amino acid sequence of SDM-- is:

(SEQ ID NO: 61)
MIPGGLSEAKPATPEIQEIVDKVKPQLEEKTNETYGKLEAVQYKTQVLAS
TNYYIKVRAGDNKYMHLKVFNGP.

[0617] The amino acid sequence of SQM- is:

(SEQ ID NO: 62)
MIPRGLSEAKPATPEIQEIVDKVKPQLEEKTNETYGKLEAVQYKTQVLAS
TNYYIKVRAGDNKYMHLKVFNGPPGQNEDLVRS.

[0618] The amino acid sequence of SQM-- is:

(SEQ ID NO: 63)
MIPRGLSEAKPATPEIQEIVDKVKPQLEEKTNETYGKLEAVQYKTQVLAS
TNYYIKVRAGDNKYMHLKVFNGP.

[0619] The amino acid sequence of SUC- is:

(SEQ ID NO: 64)
MIPGGLSEAKPATPEIQEIVDKVKPQLEEKTNETYGKLEAVQYKTQVVAG
TNYYIKVRAGDNKYMHLKVF NGPPGQNEDLVRS.

[0620] The amino acid sequence of SUC-- is:

(SEQ ID NO: 65)
MIPGGLSEAKPATPEIQEIVDKVKPQLEEKTNETYGKLEAVQYKTQVVAG
TNYYIKVRAGDNKYMHLKVFNGP.

[0621] The amino acid sequence of SUM- is:

(SEQ ID NO: 66)
MIPGGLSEAKPATPEIQEIVDKVKPQLEEKTNETYGKLEAVQYKTQVLAS
TNYYIKVRAGDNKYMHLKVFKSLPGQNEDLVLT.

[0622] The amino acid sequence of SUM-- is:

(SEQ ID NO: 67)
MIPGGLSEAKPATPEIQEIVDKVKPQLEEKTNETYGKLEAVQYKTQVLAS
TNYYIKVRAGDNKYMHLKVFKSL.

[0623] The amino acid sequence of SUN- is:

(SEQ ID NO: 68)
MIPRGLSEAKPATPEIQEIVDKVKPQLEEKTNETYGKLEAVQYKTQVVAG
TNYYIKVRAGDNKYMHLKVFKSLPGQNEDLVLT.

[0624] The amino acid sequence of SUN-- is:

(SEQ ID NO: 69)
MIPRGLSEAKPATPEIQEIVDKVKPQLEEKTNETYGKLEAVQYKTQVVAG
TNYYIKVRAGDNKYMHLKVFKSL.

[0625] The amino acid sequence of SQT is:

(SEQ ID NO: 70)
MIPRGLSEAKPATPEIQEIVDKVKPQLEEKTNETYGKLEAVQYKTQVLAS
TNYYIKVRAGDNKYMHLKVFNGPPGQNADRVLTGYQVDKNKDDELTGF.

SQT contains an Arg residue at position 4 as a result of an engineered AvrII restriction enzyme site added to the open reading frame as compared to STM or wild-type SteA. In some embodiments, a polynucleotide sequence encoding an intracellular binding domain may be inserted at the AvrII site of SQT, thereby introducing an intracellular binding domain amino acid sequence into the N-terminus of SQT. SQT also contains a Leu residue at position 48 as a result of an engineered NheI restriction enzyme site added to the open reading frame at codons 48-50, inclusive, as compared to wild-type SteA or STM. In some embodiments, a polynucleotide sequence encoding an intracellular binding domain may be inserted at the NheI site of SQT, thereby introducing an intracellular binding domain amino acid sequence into loop 1. SQT also contains the sequence Asn-Gly-Pro at positions 71-73 as a result of an engineered RsrII site added to the open reading frame as compared to wild-type SteA or STM. SQT also contains the sequence Ala-Asp-Arg at positions 78-80 as a result of an engineered RsrII site added to the open reading frame as compared to wild type SteA or STM. In some embodiments, a polynucleotide sequence encoding an intracellular binding domain may be inserted between the RsrII sites of SQT, thereby replacing loop 2 with an intracellular binding domain amino acid sequence.

[0626] The amino acid sequence of SQL is:

(SEQ ID NO: 71)
MIPRGLSEAKPATPEIQEIVDKVKPQLEEKTNETYGKLEAVQYKTQVLAL
ASTNYYIKVRAGDNKYMHLKVFNGPPGQNADRVLTGYQVDKNKDDELTGF.

[0627] In some embodiments, a SteA scaffold polypeptide as used in the compositions and methods of the invention comprises an amino acid sequence having at least about 60% (e.g., about 60%, about 62%, about 64%, about 66%, about 68%, about 70%, about 72%, about 74%, about 76%, about 78%, about 80%, about 82%, about 84%, about 86%, about 88%, about 90%, about 92%, about 94%, about 96%, about 98%, or about 99% identity to an amino acid sequence selected from the group consisting of SEQ ID NOs: 53-71. In some embodiments, a SteA scaffold polypeptide of the invention includes an amino acid sequence selected from the group consisting of SEQ ID NOs: 53-71. In particular embodiments, a SteA scaffold polypeptide of the invention comprises an amino acid sequence having at least about 60% (e.g., about 60%, about 62%, about 64%, about 66%, about 68%, about 70%, about 72%, about 74%, about 76%, about 78%, about 80%, about 82%, about 84%, about 86%, about 88%, about 90%, about 92%, about 94%, about 96%, about 98%, or about 99%), identity to the amino acid sequence of SEQ ID NO: 70. In some embodiments, a SteA scaffold polypeptide of the invention comprises an amino acid sequence of SEQ ID NO: 70.

[0628] A fusion polypeptide or SteA scaffold polypeptide of the invention may be derived from any SteA scaffold polypeptide known in the art. For example, a SteA scaffold polypeptide may include one or more mutational changes, e.g., amino acid insertions, deletions or substitutions, as compared to any SteA scaffold polypeptide described herein or known in the art. In some embodiments, a SteA scaffold polypeptide may include one or more mutational changes in one or more (e.g., 1, 2, or 3) of the following three regions: the N-terminus (e.g., a mutational change in the one or more of the first 8 codons that encode the first 8 amino acids of a SteA scaffold polypeptide), the loop 1 region (e.g., a mutational change in one or more (e.g., 1, 2, 3, 4, 5, 6, 7, 8, or 9 mutational changes) of codons 46 to 54 inclusive that encode amino acids within or adjacent to loop 1 of a SteA scaffold polypeptide), and/or the loop 2 region (e.g., a mutational change in one or more (e.g., 1, 2, 3, 4, 5, 6, 7, 8, 9, 10, 11, 12, 13, 14, 15, 16, 17, or 18 mutational changes) of codons 67 to 84 inclusive that encode amino acids within or adjacent to loop 2 of a SteA scaffold polypeptide), for example, as described in U.S. Pat. No. 8,853,131, incorporated herein by reference. In some embodiments, a SteA scaffold polypeptide may include one or more mutational changes in the N-terminus as compared to a reference SteA scaffold polypeptide. In some embodiments, a SteA scaffold polypeptide may include one or more mutational changes in the loop 1 region as compared to a reference SteA scaffold polypeptide. In some embodiments, a SteA scaffold polypeptide may include one or more mutational changes in the loop 2 region as compared to a reference SteA scaffold polypeptide. In some embodiments, a SteA scaffold polypeptide may include one or more mutational changes in the N-terminus and the loop 1 region as compared to a reference SteA scaffold polypeptide. In some embodiments, a SteA scaffold polypeptide may include one or more mutational changes in the N-terminus and the loop 2 region as compared to a reference SteA scaffold polypeptide. In some embodiments, a SteA scaffold polypeptide may include one or more mutational changes in the loop 1 region and the loop 2 region as compared to a reference SteA scaffold polypeptide. In some embodiments, a SteA scaffold polypeptide may include one or more mutational changes in the N-terminus, the loop 1 region, and the loop 2 region as compared to a reference SteA scaffold polypeptide.

[0629] The effects of a mutational change, if any, on the conformational stability, expression level, secondary structure, ability to display an intracellular binding domain amino acid sequence inserted in an insertion site, or other characteristics of a SteA scaffold polypeptide can readily be determined by a person of ordinary skill in the art, for example, using methods described in U.S. Pat. Nos. 8,063,019 and 8,853,131, incorporated herein by reference. For example, in some embodiments, a SteA scaffold polypeptide retains a substantially similar conformational stability as compared to any of the SteA scaffold polypeptides described herein, for example, wild-type SteA, STM, SQM, or SQT. Conformational stability may be determined for example, by methods including but not limited to differential scanning fluorimetry, circular dichroism, spectroscopy, or other methods known in the art. Secondary structure may be determined, for example, by circular dichroism or other methods known in the art. In some embodiments, a SteA scaffold polypeptide retains a substantially similar expression level as compared to any of the SteA scaffold polypeptides described herein, for example, wild-type SteA, STM, SQM, or SQT. Expression levels may be determined, for example, by methods including but not limited to Western blot, immunohistochemistry (IHC), mass spectrometry, enzyme-linked immunosorbent assay (ELISA), or by other methods known in the art. In some embodiments, a SteA scaffold polypeptide retains a substantially similar ability to display a domain amino acid sequence as compared to any of the SteA scaffold polypeptides described herein, for example, wild-type SteA, STM, SQM, or SQT. The ability of a SteA scaffold polypeptide to display an intracellular binding domain amino acid sequence may be determined by testing whether a known binding partner of an intracellular binding domain amino acid sequence is able to physically interact with the intracellular binding domain amino acid sequence when presented in the context of a SteA scaffold polypeptide, for example, by co-immunoprecipitation, yeast two-hybrid, or other methods known in the art.

[0630] In some embodiments, a fusion polypeptide of the invention comprises a SteA scaffold polypeptide and one or more intracellular binding domains located at a N-terminal insertion site, a loop 1 insertion site, and/or a loop 2 insertion site. In some embodiments, a fusion polypeptide includes an intracellular binding domain located at an N-terminal insertion site of a SteA scaffold polypeptide. In some embodiments, an N-terminal insertion site includes one or more of positions 1-8 inclusive (e.g., position 1, 2, 3, 4, 5, 6, 7, and/or 8) of a SteA scaffold polypeptide. In particular embodiments, the N-terminal insertion site may be position 4 of a SteA scaffold polypeptide. In some embodiments, a fusion polypeptide includes an intracellular binding domain located at a loop 1 insertion site. In some embodiments, a loop 1 insertion site includes one or more of positions 46 to 54 inclusive (e.g., position 46, 47, 48, 49, 50, 51, 52, 53, and/or 54) of a SteA scaffold polypeptide. In particular embodiments, the loop 1 insertion site may include positions 48-50, e.g., position 48, 49, and/or 50 of a SteA scaffold polypeptide. In some embodiments, a fusion polypeptide includes an intracellular binding domain located at a loop 2 insertion site. In particular embodiments, the loop 2 insertion site includes one or more of positions 71-83 inclusive (e.g., position 71, 72, 73, 74, 75, 76, 77, 78, 79, 80, 81, 82, and/or 83) of a SteA scaffold polypeptide. In further embodiments, the loop 2 insertion site may include positions 71-73, 78-80, and/or 82-83 of a SteA scaffold polypeptide. In some embodiments, a SteA scaffold polypeptide may include more than one (e.g., 1, 2, 3, 4, 5, or more) intracellular binding domains located at the same insertion site (e.g., an N-terminal insertion site, a loop 1 insertion site, or a loop 2 insertion site).

[0631] In some embodiments, a fusion polypeptide comprising a SteA scaffold polypeptide may include one or more intracellular binding domains located at multiple insertion sites (e.g., 2 or 3 insertion sites) selected from an N-terminal insertion site, a loop 1 insertion site, and/or a loop 2 insertion site. In some embodiments, the same intracellular binding domain may be located at two or more insertion sites. In other embodiments, different intracellular binding domains may be located at two or more insertion sites.

[0632] In some embodiments, an intracellular binding domain amino acid sequence may include between about 1 and about 50 amino acids. For example, in some embodiments, an intracellular binding domain amino acid sequence may include, for example, 1 to 50 amino acids, 1 to 40 amino acids, 1 to 30 amino acids, 1 to 20 amino acids, 1 to 10 amino acids, or 1 to 5 amino acids. In particular embodiments, an intracellular binding domain amino acid sequence may include, for example, between about 1 and about 26 amino acids (e.g., 1, 2, 3, 4, 5, 6, 7, 8, 9, 10, 11, 12, 13, 14, 15, 16, 17, 18, 19, 20, 21, 22, 23, 24, 25, or 26 amino acids). In other particular embodiments, an intracellular binding domain may include, for example, between about 1 and about 13 amino acids (e.g., 1, 2, 3, 4, 5, 6, 7, 8, 9, 10, 11, 12, or 13 amino acids). In particular embodiments, an intracellular binding domain may include about 10 to about 40 amino acid residues, e.g., about 10, 12, 14, 16, 18, 20, 22, 24, 26, 28, 30, 32, 34, 36, 38, or 40 residues.

[0633] It is to be understood that in addition to a SteA scaffold polypeptide and one or more intracellular binding domains, a fusion polypeptide of the present invention may include additional elements, including linkers and epitope tags. Functions of a linker region can include introduction of restriction enzyme sites into the nucleotide sequence, introduction of a flexible component or space-creating region between two protein domains, or creation of an affinity tag for specific molecular interaction. A linker may be any suitable length, for example, 1, 2, 3, 4, 5, 6, 7, 8, 9, 10, or more amino acids long. An epitope tag may be included to facilitate detection and/or purification of a fusion polypeptide. Exemplary non-limiting epitope tags include FLAG, V5, HA, myc, GFP, and His.

### Bel-2-Like Polypeptides

[0634] The present invention also includes mRNAs encoding a polypeptide that inhibits a BH3 domain encoded by constructs described herein. In some embodiments, an mRNA of the invention may encode one or more Bcl-2-like polypeptides or a variant or fragment thereof. In particular embodiments, an mRNA of the invention may encode a prosurvival Bcl-2-like polypeptide, such as Bcl-2, Bcl-X_{L}, Bcl-w, Mcl-1 or A1 polypeptide, or a variant or fragment thereof. Structural studies have shown that the hydrophobic face of the amphipathic helix present in BH3 domains inserts into a hydrophobic groove formed by the BH1, BH2 and BH3 domains of the prosurvival Bcl-2-like polypeptides, such as Bcl-2, Bcl-X_{L}, Bcl-w, Mcl-1 and A1, thus neutralizing the prosurvival Bcl-2-like polypeptides. In particular embodiments, the Bcl-2-like polypeptides and variants thereof comprise BH1, BH2 and BH3 domains. In particular embodiments, variants may include one or more N-terminal or C-terminal deletion. For example, in particular embodiments, soluble, monomeric prosurvival Bcl-2-like polypeptides have a deletion of their hydrophobic C-terminal domain. In certain embodiments, Mcl-1 and other Bcl-2-like polypeptides have a deletion of an N-terminal PEST region. In some embodiments, the Bcl-2-like polypeptide is a human polypeptide. In other embodiments, the Bcl-2-like polypeptide may be from a non-human species, e.g., Caenorhabditis elegans, rodents (e.g., mice and rats), or non-human primates. Without wishing to be bound by theory, it is believed that when expressed in the same cell, the exogenous Bcl-2-like polypeptide or variant thereof binds to the BH3 domain of the BH3 fusion polypeptide, thus sequestering it and preventing it from inducing apoptosis (see, for example, Day et al., J. Mol. Biol. 380:958-971, 2008).

[0635] In some embodiments, a Bcl-2-like polypeptide or variant or fragment thereof may include an amino acid sequence having at least about 60% (e.g., about 60%, about 62%, about 64%, about 66%, about 68%, about 70%, about 72%, about 74%, about 76%, about 78%, about 80%, about 82%, about 84%, about 86%, about 88%, about 90%, about 92%, about 94%, about 96%, about 98%, or about 99%) identity to the amino acid sequence of a human Bcl-2, Bcl-X_{L}, Bcl-w, Mcl-1 or A1 polypeptide, the amino acid sequences of which are shown in SEQ ID NOs: 38-42, respectively.

[0636] In particular embodiments, a Bcl-2-like polypeptide variant is a soluble Bcl-2-like polypeptide variant, such as a Bcl-2 polypeptide comprising a C-terminal truncation (e.g., deletion of the C-terminal 22-32 amino acid residues, e.g., the C-terminal 22 or 43 amino acid residues), a Bcl-X_{L} polypeptide comprising a C-terminal truncation (e.g., deletion of the C-terminal 24 amino acid residues), a Bcl-w polypeptide comprising a C-terminal truncation (e.g., deletion of the C-terminal 29 amino acid residues), a Mcl-1 polypeptide comprising C-terminal and N-terminal truncations (e.g., deletion of the C-terminal 23 amino acid residues and the N-terminal 151 amino acid residues), or an A1 polypeptide comprising a C-terminal truncation (e.g., deletion of the C-terminal 20 amino acid residues). In particular embodiments, a Bcl-2-like polypeptide may in addition or alternatively comprise one or more amino acid substitutions as compared to its corresponding wild type Bcl-2-like polypeptide. In certain embodiments, a variant includes a Bcl-2 polypeptide having one or more C29S, D34A, or A128E amino acid substitutions. In certain embodiments, a variant includes a Bcl-X_{L} polypeptide having a D61A amino acid substitution. In certain embodiments, BH3-trap polypeptides (e.g., Bcl-2-like polypeptides) of the present invention include: Mcl-1 del.N/C; Bcl-w (C29S/A128E); Bcl-2 (D34A) del.C32; Bcl-X_{L} del.C24, Mcl-1 del.N/C(2010), and Bcl-xL (D61A) del.C24 (the amino acid sequences of which are shown in SEQ ID NOs: 94-99, respectively) and wild type Bcl-2-like polypeptides. Illustrative soluble monomeric prosurvival proteins are also described in Chen et al., Molecular Cell (2005) 17, 393-403, which is hereby incorporated by reference in its entirety.

[0637] In some embodiments, a Bcl-2-like polypeptide or variant thereof as used herein may include an amino acid sequence having at least about 60% (e.g., about 60%, about 62%, about 64%, about 66%, about 68%, about 70%, about 72%, about 74%, about 76%, about 78%, about 80%, about 82%, about 84%, about 86%, about 88%, about 90%, about 92%, about 94%, about 96%, about 98%, or about 99%) identity to any one of any one of SEQ ID NOs: 38-42. In some embodiments, the Bcl-2-like polypeptide is encoded by an mRNA sequence selected from the group consisting of SEQ ID NOs: 78-105.

[0638] In some embodiments, a Bcl-2-like polypeptide may be able to inhibit apoptosis induced by a BH3 domain polypeptide. A person of ordinary skill in the art can readily determine if a Bcl-2-like polypeptide is able to inhibit BH3-induced apoptosis using a variety of methods, for example, caspase activation assays (e.g., caspase-3/7 activation assays), stains and dyes (e.g., CELLTOX™, MITOTRACKER® Red, propidium iodide, and YOYO3), cell viability assays, cell morphology, and PARP-1 cleavage. In particular embodiments, the Bcl-2-like polypeptide is Bcl-2, Bcl-x_{L}, Bcl-w, Mcl-1 or A1. In some embodiments, the Bcl-2-like polypeptide is a functional variant selected from Mcl-1del.N/C, Bcl-2 (C295/A128E), Bcl-2 (D34A) del.C32, Bcl-xL del.C24, Mcl-1 del.N/C(2010), and Bel-xL (D61A) del.C24.

[0639] The mRNA constructs encoding the Bcl-2-like polypeptides can be used in combination with an mRNA construct encoding one or more BH3 domains by co-transfection of both constructs into cells. Alternatively, the Bcl-2-like polypeptide constructs can be introduced into cells as a single agent, wherein they can act to inhibit the activity of endogenous BH3 domains.

### Anti-MCL1 Constructs

[0640] The present invention also includes mRNAs encoding a polypeptide that targets MCL1, referred to herein as anti-MCL1 constructs, which can be used in combination with an mRNA construct encoding one or more BH3 domains to synergistically promote apoptosis. Example 5 describes in detail anti-MCL1 constructs that exhibit synergistic pro-apoptotic effects when used in combination with an SQT-BH3 construct. The anti-MCL1 constructs can similarly be used in combination with the single BH3 domain or multimer BH3 domain mRNA constructs described herein. While not intending to be limited by mechanism, it is thought that by neutralizing MCL1 in tumor cells, the tumor then reverts to sole reliance on BCLXL, BCL2 and/or other prosurvival members of the family as the prosurvival mechanism/pathway. Accordingly, use of BH3-domain encoded mRNA constructs, which specifically destroys BCLXL, BCL2 and/or other prosurvival members of the family then leads to better tumor killing when used in combination with an anti-MCL1 agent.

[0641] Non-limiting examples of sequences that can be used in anti-MCL1 constructs are shown in SEQ ID NOs: 107-116 (with an epitope tag) and in SEQ ID NOs: 117-126 (without an epitope tag). Nucleotide sequences encoding the open reading frames of SEQ ID NOs: 107-116 are shown in SEQ ID NOs: 127-136, respectively. Sequences that target MCL1 also have been described in the art (see e.g., Lee, E. F. et al. (2008) J. Cell. Biol. 180:341-355; Foight, G. W. et al. (2014) ACS Chem. Biol. 9:1962-1968; Placzek, W. J. et al. (2011) J. Biol. Chem. 286:39829-39835). In one embodiment, an anti-MCL1 construct comprises a mutated Bim BH3 domain, such as a mutant Bim BH3 domain having two alanine substitutions, as shown in SEQ ID NO: 137. An anti-MCL1 construct can comprise a single mutated Bim BH3 domain, or multiple copies (e.g., 2, 3, 4) of the mutated Bim BH3 domain.

[0642] An anti-MCL1 construct also can encode one or more copies of a linker sequence, such as a protease-sensitive peptide linker sequence, a cleavable-linker sequence and the like. For example, in a construct containing multiple copies of a polypeptide domain, a sequence encoding a protease-sensitive linker can be located between each of the sequences encoding the polypeptide domain. In one embodiment, the cleavable linker is an F2A linker (e.g., having the amino acid sequence shown in SEQ ID NO: 138). In other embodiments, the cleavable linker is a T2A linker (e.g., having the amino acid sequence shown in SEQ ID NO: 139), a P2A linker (e.g., having the amino acid sequence shown in SEQ ID NO: 140) or an E2A linker (e.g., having the amino acid sequence shown in SEQ ID NO: 141). The skilled artisan will appreciate that other art-recognized linkers may be suitable for use in the constructs of the invention (e.g., encoded by the polynucleotides of the invention). The skilled artisan will likewise appreciate that other multicistronic constructs may be suitable for use in the invention. In exemplary embodiments, the construct design yields approximately equimolar amounts of intrabody and/or domain thereof encoded by the constructs of the invention.

[0643] Furthermore, an anti-MCL1 construct can include one or more microRNA binding sites. Such binding sites are described hereinbefore. For example, in one embodiment, an anti-MCL1 construct includes a miR122 binding site.

[0644] An anti-MCL1 construct also can include an epitope tag, such as a FLAG, His or V5 epitope tag.

[0645] In other embodiments, an anti-MCL1 construct comprises a scaffold polypeptide. Thus, the construct can encode a fusion polypeptide of the scaffold polypeptide and the anti-MCL1 polypeptide(s). Suitable scaffold polypeptides include the SteA scaffolds described herein, such as an SQT scaffold. The amino acid sequence of a non-limiting example of an SQT scaffold/anti-MCL1 fusion polypeptide is shown in SEQ ID NO: 107, in which a single mutated Bim BH3 domain has been inserted into the N-terminal loop of the SQT scaffold protein. The nucleotide sequence encoding this ORF used in the mRNA construct is shown in SEQ ID NO: 127. The amino acid sequence of this ORF without the V5 epitope tag is shown in SEQ ID NO: 117.

[0646] For use of an anti-MCL1 construct in combination with an mRNA construct encoding one or more BH3 domains, both constructs can be incorporated into the same mmRNA construct and introduced into cells as a single construct. Alternatively, the two mmRNAs can be prepared as two separate constructs and they can be used in combination by introducing both constructs into the same cells. Either or both can be delivered to cells in a lipid nanoparticle as described herein.

### Screening of BH3 Domain Libraries

[0647] In one embodiment, a BH3 domain(s) of interest is selected by screening a library of BH3 domains. In certain embodiments, the library can be a library of BH3 domains that are presented on a scaffold, such as a SteA scaffold fusion polypeptide. That is, a library of nucleotides encoding BH3 domains can be incorporated into mRNAs encoding the SteA scaffold fusion polypeptide, e.g., at the N-terminal insertion site, at the loop 1 insertion site and/or at the loop 2 insertion site, and the resultant BH3 domain library can be screened for a BH3 domains having the desired binding property of interest (e.g., apoptotic ability).

[0648] The library of BH3 domains can be, for example, a library of mutated versions of known BH3 domains or can be a library of randomly generated polypeptides, for example having a BH3 domain consensus sequence.

[0649] In one embodiment, the library is a library of BH3 domains having a BH3 domain consensus sequence. For example, a library of polypeptides having the amino acid sequence of X₁X₂X₃X₄X₅X₆X₇X₈X₉DX₁₀X₁₁X₁₂, wherein X₁, X₅, X₈, and X₁₁ are, independently, any hydrophobic residue, X₂ and X₉ are, independently, Gly, Ala, or Ser, X₃, X₄, X₆, and X₇ are, independently, any amino acid residue, X₁₀ is Asp or Glu, and X₁₂ is Asn, His, Asp, or Tyr, can be generated and screened for a BH3 domain having the desired functional property, such as activation of apoptosis. In some embodiments, a hydrophobic residue is Leu, Ala, Val, Ile, Pro, Phe, Met or Trp. In some embodiments, X₅ is Leu.

[0650] In one embodiment, a library of single BH3 domains is screened. In another embodiment, a library of multiple BH3 domains (e.g., constructed similar to the multimer BH3 constructs described herein) is screened. In yet another embodiment, a library of BH3 domains presented on a scaffold, as part of a scaffold-BH3 domain fusion polypeptide, is screened. In one example of this latter embodiment, the library of BH3 domains is presented on a SteA scaffold fusion protein and screened for desired binding and/or functional properties. In another embodiment, the library of BH3 domains is screened using a different expression system, such as phage display, yeast display or other library expression system well-established in the art, a BH3 domain is selected having the desired binding and/or functional properties, the BH3 domain sequence is determined and then a nucleotide sequence encoding the selected BH3 domain sequence is introduced into an mRNA encoding a SteA scaffold fusion polypeptide, e.g., at the N-terminal insertion site, the loop insertion site and/or the loop 2 insertion site such that the selected BH3 domain can be presented by the SteA scaffold fusion polypeptide. General methodologies for screening libraries using scaffold proteins in systems such as phage display are described in, for example, PCT Publication WO 2014/125290, the contents of which is incorporated herein in its entirety.

### Nanoparticles

[0651] The mRNAs of the invention may be formulated in nanoparticles or other delivery vehicles, e.g., to protect them from degradation when delivered to a subject. Illustrative nanoparticles are described in Panyam, J. & Labhasetwar, V. Adv. Drug Deliv. Rev. 55, 329-347 (2003) and Peer, D. et al. Nature Nanotech. 2, 751-760 (2007). In certain embodiments, an mRNA of the invention is encapsulated within a nanoparticle. In particular embodiments, a nanoparticle is a particle having at least one dimension (e.g., a diameter) less than or equal to 1000 nM, less than or equal to 500 nM or less than or equal to 100 nM. In particular embodiments, a nanoparticle includes a lipid. Lipid nanoparticles include, but are not limited to, liposomes and micelles. Any of a number of lipids may be present, including cationic and/or ionizable lipids, anionic lipids, neutral lipids, amphipathic lipids, PEGylated lipids, and/or structural lipids. Such lipids can be used alone or in combination. In particular embodiments, a lipid nanoparticle comprises one or more mRNAs described herein, e.g., a mRNA encoding one or more BH3 domains and/or a mRNA encoding a BH3-trap polypeptide.

[0652] In some embodiments, the lipid nanoparticle formulations of the mRNAs described herein may include one or more (e.g., 1, 2, 3, 4, 5, 6, 7, or 8) cationic and/or ionizable lipids. Such cationic lipids include, but are not limited to, 3-(didodecylamino)-N1,N1,4-tridodecyl-1-piperazineethanamine (KL10), N1-[2-(didodecylamino)ethyl]-N1,N4,N4-tridodecyl-1,4-piperazinediethanamine (KL22), 14,25-ditridecyl-15,18,21,24-tetraaza-octatriacontane (KL25), 1,2-dilinoleyloxy-N,N-dimethylaminopropane (DLin-DMA), 2,2-dilinoleyl-4-dimethylaminomethyl-[1,3]-dioxolane (DLin-K-DMA), heptatriaconta-6,9,28,31-tetraen-19-yl 4-(dimethylamino)butanoate (DLin-MC3-DMA), 2,2-dilinoleyl-4-(2-dimethylaminoethyl)-[1,3]-dioxolane (DLin-KC2-DMA), 2-({8-[(3β)-cholest-5-en-3-yloxy]octyl}oxy)-N,N-dimethyl-3-[(9Z,12Z)-octadeca-9,12-dien-1-yloxy]propan-1-amine (Octyl-CLinDMA), (2R)-2-({8-[(3β)-cholest-5-en-3-yloxy]octyl}oxy)-N,N-dimethyl-3-[(9Z,12Z)-octadeca-9,12-dien-1-yloxy]propan-1-amine (Octyl-CLinDMA (2R)), (2S)-2-({8-[(3β)-cholest-5-en-3-yloxy]octyl}oxy)-N,N-dimethyl-3-[(9Z,12Z)-octadeca-9,12-dien-1-yloxy]propan-1-amine (Octyl-CLinDMA (2S)), N,N-dioleyl-N,N-dimethylammonium chloride (“DODAC”); N-(2,3-dioleyloxy)propyl-N,N—N-triethylammonium chloride (“DOTMA”); N,N-distearyl-N,N-dimethylammonium bromide (“DDAB”); N-(2,3-dioleoyloxy)propyl)-N,N,N-trimethylammonium chloride (“DOTAP”); 1,2-Dioleyloxy-3-trimethylaminopropane chloride salt (“DOTAP.Cl”); 3-β-(N—(N′,N′-dimethylaminoethane)-carbamoyl)cholesterol (“DC-Chol”), N-(1-(2,3-dioleyloxy)propyl)-N-2-(sperminecarboxamido)ethyl)-N,N-dimethyl-ammonium trifluoracetate (“DOSPA”), dioctadecylamidoglycyl carboxyspermine (“DOGS”), 1,2-dioleoyl-3-dimethylammonium propane (“DODAP”), N,N-dimethyl-2,3-dioleyloxy)propylamine (“DODMA”), and N-(1,2-dimyristyloxyprop-3-yl)-N,N-dimethyl-N-hydroxyethyl ammonium bromide (“DMRIE”). Additionally, a number of commercial preparations of cationic and/or ionizable lipids can be used, such as, e.g., LIPOFECTIN® (including DOTMA and DOPE, available from GIBCO/BRL), and LIPOFECTAMINE® (including DOSPA and DOPE, available from GIBCO/BRL). KL10, KL22, and KL25 are described, for example, in U.S. Pat. No. 8,691,750, which is incorporated herein by reference in its entirety. In particular embodiments, the lipid is DLin-MC3-DMA or DLin-KC2-DMA.

[0653] Anionic lipids suitable for use in lipid nanoparticles of the invention include, but are not limited to, phosphatidylglycerol, cardiolipin, diacylphosphatidylserine, diacylphosphatidic acid, N-dodecanoyl phosphatidylethanoloamine, N-succinyl phosphatidylethanolamine, N-glutaryl phosphatidylethanolamine, lysylphosphatidylglycerol, and other anionic modifying groups joined to neutral lipids.

[0654] Neutral lipids suitable for use in lipid nanoparticles of the invention include, but are not limited to, diacylphosphatidylcholine, diacylphosphatidylethanolamine, ceramide, sphingomyelin, dihydrosphingomyelin, cephalin, and cerebrosides. Lipids having a variety of acyl chain groups of varying chain length and degree of saturation are available or may be isolated or synthesized by well-known techniques. Additionally, lipids having mixtures of saturated and unsaturated fatty acid chains can be used. In some embodiments, the neutral lipids used in the invention are DOPE, DSPC, DPPC, POPC, or any related phosphatidylcholine. In some embodiments, the neutral lipid may be composed of sphingomyelin, dihydrosphingomyeline, or phospholipids with other head groups, such as serine and inositol.

[0655] In some embodiments, amphipathic lipids are included in nanoparticles of the invention. Exemplary amphipathic lipids suitable for use in nanoparticles of the invention include, but are not limited to, sphingolipids, phospholipids, and aminolipids. In some embodiments, a phospholipid is selected from the group consisting of
[0656] 1,2-dilinoleoyl-sn-glycero-3-phosphocholine (DLPC),
[0657] 1,2-dimyristoyl-sn-glycero-phosphocholine (DMPC),
[0658] 1,2-dioleoyl-sn-glycero-3-phosphocholine (DOPC),
[0659] 1,2-dipalmitoyl-sn-glycero-3-phosphocholine (DPPC),
[0660] 1,2-distearoyl-sn-glycero-3-phosphocholine (DSPC),
[0661] 1,2-diundecanoyl-sn-glycero-phosphocholine (DUPC),
[0662] 1-palmitoyl-2-oleoyl-sn-glycero-3-phosphocholine (POPC),
[0663] 1,2-di-O-octadecenyl-sn-glycero-3-phosphocholine (18:0 Diether PC),
[0664] 1-oleoyl-2-cholesterylhemisuccinoyl-sn-glycero-3-phosphocholine (OChemsPC),
[0665] 1-hexadecyl-sn-glycero-3-phosphocholine (C16 Lyso PC),
[0666] 1,2-dilinolenoyl-sn-glycero-3-phosphocholine,
[0667] 1,2-diarachidonoyl-sn-glycero-3-phosphocholine,
[0668] 1,2-didocosahexaenoyl-sn-glycero-3-phosphocholine,1,2-dioleoyl-sn-glycero-3-phosphoethanolamine (DOPE), 1,2-diphytanoyl-sn-glycero-3-phosphoethanolamine (ME 16.0 PE),
[0669] 1,2-distearoyl-sn-glycero-3-phosphoethanolamine,
[0670] 1,2-dilinoleoyl-sn-glycero-3-phosphoethanolamine,
[0671] 1,2-dilinolenoyl-sn-glycero-3-phosphoethanolamine,
[0672] 1,2-diarachidonoyl-sn-glycero-3-phosphoethanolamine,
[0673] 1,2-didocosahexaenoyl-sn-glycero-3-phosphoethanolamine,
[0674] 1,2-dioleoyl-sn-glycero-3-phospho-rac-(1-glycerol) sodium salt (DOPG), and sphingomyelin.
   Other phosphorus-lacking compounds, such as sphingolipids, glycosphingolipid families, diacylglycerols, and β-acyloxyacids, may also be used. Additionally, such amphipathic lipids can be readily mixed with other lipids, such as triglycerides and sterols.

[0675] In some embodiments, the lipid component of a nanoparticle of the invention may include one or more PEGylated lipids. A PEGylated lipid (also known as a PEG lipid or a PEG-modified lipid) is a lipid modified with polyethylene glycol. The lipid component may include one or more PEGylated lipids. A PEGylated lipid may be selected from the non-limiting group consisting of PEG-modified phosphatidylethanolamines, PEG-modified phosphatidic acids, PEG-modified ceramides, PEG-modified dialkylamines, PEG-modified diacylglycerols, and PEG-modified dialkylglycerols. For example, a PEGylated lipid may be PEG-c-DOMG, PEG-DMG, PEG-DLPE, PEG-DMPE, PEG-DPPC, or a PEG-DSPE lipid.

[0676] A lipid nanoparticle of the invention may include one or more structural lipids. Exemplary, non-limiting structural lipids that may be present in the lipid nanoparticles of the invention include cholesterol, fecosterol, sitosterol, campesterol, stigmasterol, brassicasterol, ergosterol, tomatidine, tomatine, ursolic acid, or alpha-tocopherol).

[0677] In some embodiments, one or more mRNA of the invention may be formulated in a lipid nanoparticle having a diameter from about 1 nm to about 900 nm, e.g., about 1 nm to about 100 nm, about 1 nm to about 200 nm, about 1 nm to about 300 nm, about 1 nm to about 400 nm, about 1 nm to about 500 nm, about 1 nm to about 600 nm, about 1 nm to about 700 nm, about 1 nm to 800 nm, about 1 nm to about 900 nm. In some embodiments, the nanoparticle may have a diameter from about 10 nm to about 300 nm, about 20 nm to about 200 nm, about 30 nm to about 100 nm, or about 40 nm to about 80 nm. In some embodiments, the nanoparticle may have a diameter from about 30 nm to about 300 nm, about 40 nm to about 200 nm, about 50 nm to about 150 nm, about 70 to about 110 nm, or about 80 nm to about 120 nm. In one embodiment, an mRNA may be formulated in a lipid nanoparticle having a diameter from about 10 to about 100 nm including ranges in between such as, but not limited to, about 10 to about 20 nm, about 10 to about 30 nm, about 10 to about 40 nm, about 10 to about 50 nm, about 10 to about 60 nm, about 10 to about 70 nm, about 10 to about 80 nm, about 10 to about 90 nm, about 20 to about 30 nm, about 20 to about 40 nm, about 20 to about 50 nm, about 20 to about 60 nm, about 20 to about 70 nm, about 20 to about 80 nm, about 20 to about 90 nm, about 20 to about 100 nm, about 30 to about 40 nm, about 30 to about 50 nm, about 30 to about 60 nm, about 30 to about 70 nm, about 30 to about 80 nm, about 30 to about 90 nm, about 30 to about 100 nm, about 40 to about 50 nm, about 40 to about 60 nm, about 40 to about 70 nm, about 40 to about 80 nm, about 40 to about 90 nm, about 40 to about 100 nm, about 50 to about 60 nm, about 50 to about 70 nm about 50 to about 80 nm, about 50 to about 90 nm, about 50 to about 100 nm, about 60 to about 70 nm, about 60 to about 80 nm, about 60 to about 90 nm, about 60 to about 100 nm, about 70 to about 80 nm, about 70 to about 90 nm, about 70 to about 100 nm, about 80 to about 90 nm, about 80 to about 100 nm, and/or about 90 to about 100 nm. In one embodiment, an mRNA may be formulated in a lipid nanoparticle having a diameter from about 30 nm to about 300 nm, about 40 nm to about 200 nm, about 50 nm to about 150 nm, about 70 to about 110 nm, or about 80 nm to about 120 nm including ranges in between.

[0678] In some embodiments, a lipid nanoparticle may have a diameter greater than 100 nm, greater than 150 nm, greater than 200 nm, greater than 250 nm, greater than 300 nm, greater than 350 nm, greater than 400 nm, greater than 450 nm, greater than 500 nm, greater than 550 nm, greater than 600 nm, greater than 650 nm, greater than 700 nm, greater than 750 nm, greater than 800 nm, greater than 850 nm, greater than 900 nm, or greater than 950 nm.

[0679] In some embodiments, the particle size of the lipid nanoparticle may be increased and/or decreased. The change in particle size may be able to help counter a biological reaction such as, but not limited to, inflammation, or may increase the biological effect of the mRNA delivered to a patient or subject.

[0680] In certain embodiments, it is desirable to target a nanoparticle, e.g., a lipid nanoparticle, of the invention using a targeting moiety that is specific to a cell type and/or tissue type. In some embodiments, a nanoparticle may be targeted to a particular cell, tissue, and/or organ using a targeting moiety. In particular embodiments, a nanoparticle comprises one or more mRNA described herein and a targeting moiety. Exemplary non-limiting targeting moieties include ligands, cell surface receptors, glycoproteins, vitamins (e.g., riboflavin) and antibodies (e.g., full-length antibodies, antibody fragments (e.g., Fv fragments, single chain Fv (scFv) fragments, Fab′ fragments, or F(ab′)2 fragments), single domain antibodies, camelid antibodies and fragments thereof, human antibodies and fragments thereof, monoclonal antibodies, and multispecific antibodies (e.g, bispecific antibodies)). In some embodiments, the targeting moiety may be a polypeptide. The targeting moiety may include the entire polypeptide (e.g., peptide or protein) or fragments thereof. A targeting moiety is typically positioned on the outer surface of the nanoparticle in such a manner that the targeting moiety is available for interaction with the target, for example, a cell surface receptor. A variety of different targeting moieties and methods are known and available in the art, including those described, e.g., in Sapra et al., Prog. Lipid Res. 42(5):439-62, 2003 and Abra et al., J. Liposome Res. 12:1-3, 2002.

[0681] In some embodiments, a lipid nanoparticle (e.g., a liposome) may include a surface coating of hydrophilic polymer chains, such as polyethylene glycol (PEG) chains (see, e.g., Allen et al., Biochimica et Biophysica Acta 1237: 99-108, 1995; DeFrees et al., Journal of the American Chemistry Society 118: 6101-6104, 1996; Blume et al., Biochimica et Biophysica Acta 1149: 180-184, 1993; Klibanov et al., Journal of Liposome Research 2: 321-334, 1992; U.S. Pat. No. 5,013,556; Zalipsky, Bioconjugate Chemistry 4: 296-299, 1993; Zalipsky, FEBS Letters 353: 71-74, 1994; Zalipsky, in Stealth Liposomes Chapter 9 (Lasic and Martin, Eds) CRC Press, Boca Raton Fla., 1995. In one approach, a targeting moiety for targeting the lipid nanoparticle is linked to the polar head group of lipids forming the nanoparticle. In another approach, the targeting moiety is attached to the distal ends of the PEG chains forming the hydrophilic polymer coating (see, e.g., Klibanov et al., Journal of Liposome Research 2: 321-334, 1992; Kirpotin et al., FEBS Letters 388: 115-118, 1996).

[0682] Standard methods for coupling the targeting moiety or moieties may be used. For example, phosphatidylethanolamine, which can be activated for attachment of targeting moieties, or derivatized lipophilic compounds, such as lipid-derivatized bleomycin, can be used. Antibody-targeted liposomes can be constructed using, for instance, liposomes that incorporate protein A (see, e.g., Renneisen et al., J. Bio. Chem., 265:16337-16342, 1990 and Leonetti et al., Proc. Natl. Acad. Sci. (USA), 87:2448-2451, 1990. Other examples of antibody conjugation are disclosed in U.S. Pat. No. 6,027,726. Examples of targeting moieties can also include other polypeptides that are specific to cellular components, including antigens associated with neoplasms or tumors. Polypeptides used as targeting moieties can be attached to the liposomes via covalent bonds (see, for example Heath, Covalent Attachment of Proteins to Liposomes, 149 Methods in Enzymology 111-119 (Academic Press, Inc. 1987)). Other targeting methods include the biotin-avidin system.

[0683] In some embodiments, a lipid nanoparticle of the invention includes a targeting moiety that targets the lipid nanoparticle to a cell including, but not limited to, hepatocytes, colon cells, epithelial cells, hematopoietic cells, epithelial cells, endothelial cells, lung cells, bone cells, stem cells, mesenchymal cells, neural cells, cardiac cells, adipocytes, vascular smooth muscle cells, cardiomyocytes, skeletal muscle cells, beta cells, pituitary cells, synovial lining cells, ovarian cells, testicular cells, fibroblasts, B cells, T cells, reticulocytes, leukocytes, granulocytes, and tumor cells (including primary tumor cells and metastatic tumor cells). In particular embodiments, the targeting moiety targets the lipid nanoparticle to a hepatocyte. In other embodiments, the targeting moiety targets the lipid nanoparticle to a colon cell. In some embodiments, the targeting moiety targets the lipid nanoparticle to a liver cancer cell (e.g., a hepatocellular carcinoma cell) or a colorectal cancer cell (e.g., a primary tumor or a metastasis).

[0684] Delivery Agents

[0685] a. Lipid Compound

[0686] The present disclosure provides pharmaceutical compositions with advantageous properties. In particular, the present application provides pharmaceutical compositions comprising:

[0687] (a) a polynucleotide comprising a nucleotide sequence encoding a polypeptide (e.g., SteA-BH3); and

[0688] (b) a lipid compound having the formula (I)

[chemical structure]

[0689] wherein

[0690] R₁ is selected from the group consisting of C₅₋₂₀ alkyl, C₅₋₂₀ alkenyl, —R*YR″, —YR″, and —R″M′R′;

[0691] R₂ and R₃ are independently selected from the group consisting of H, C₁₋₁₄ alkyl, C₂₋₁₄ alkenyl, —R*YR″, —YR″, and —R*OR″, or R₂ and R₃, together with the atom to which they are attached, form a heterocycle or carbocycle;

[0692] R₄ is selected from the group consisting of a C₃₋₆ carbocycle, —(CH₂)ₙQ, —(CH₂)ₙCHQR, —CHQR, —CQ(R)₂, and unsubstituted C₁₋₆ alkyl, where Q is selected from a carbocycle, heterocycle, —OR, —O(CH₂)ₙN(R)₂, —C(O)OR, —OC(O)R, —CX₃, —CX₂H, —CXH₂, —CN, —N(R)₂, —C(O)N(R)₂, —N(R)C(O)R, —N(R)S(O)₂R, —N(R)C(O)N(R)₂, —N(R)C(S)N(R)₂, and —C(R)N(R)₂C(O)OR, and each n is independently selected from 1, 2, 3, 4, and 5;

[0693] each R₅ is independently selected from the group consisting of C₁₋₃ alkyl, C₂₋₃ alkenyl, and H;

[0694] each R₆ is independently selected from the group consisting of C₁₋₃ alkyl, C₂₋₃ alkenyl, and H;

[0695] M and M′ are independently selected from —C(O)O—, —OC(O)—, —C(O)N(R′)—, —N(R′)C(O)—, —C(O)—, —C(S)—, —C(S)S—, —SC(S)—, —CH(OH)—, —P(O)(OR′)O—, —S(O)₂—, an aryl group, and a heteroaryl group;

[0696] R₇ is selected from the group consisting of C₁₋₃ alkyl, C₂₋₃ alkenyl, and H;

[0697] each R is independently selected from the group consisting of C₁₋₃ alkyl, C₂₋₃ alkenyl, and H;

[0698] each R′ is independently selected from the group consisting of C₁₋₁₈ alkyl, C₂₋₁₈ alkenyl, —R*YR″, —YR″, and H;

[0699] each R″ is independently selected from the group consisting of C₃₋₁₄ alkyl and C₃₋₁₄ alkenyl;

[0700] each R* is independently selected from the group consisting of C₁₋₁₂ alkyl and C₂₋₁₂ alkenyl;

[0701] each Y is independently a C₃₋₆ carbocycle;

[0702] each X is independently selected from the group consisting of F, Cl, Br, and I; and m is selected from 5, 6, 7, 8, 9, 10, 11, 12, and 13,

[0703] or salts or stereoisomers thereof, wherein alkyl and alkenyl groups can be linear or branched.

[0704] In some embodiments, a subset of compounds of Formula (I) includes those in which when R₄ is —(CH₂)ₙQ, —(CH₂)ₙCHQR, —CHQR, or —CQ(R)₂, then (i) Q is not —N(R)₂ when n is 1, 2, 3, 4 or 5, or (ii) Q is not 5, 6, or 7-membered heterocycloalkyl when n is 1 or 2.

[0705] In another embodiments, another subset of compounds of Formula (I) includes those in which R₁ is selected from the group consisting of C₅₋₂₀ alkyl, C₅₋₂₀ alkenyl, —R*YR″, —YR″, and —R″M′R′;

[0706] R₂ and R₃ are independently selected from the group consisting of H, C₁₋₁₄ alkyl, C₂₋₁₄ alkenyl, —R*YR″, —YR″, and —R*OR″, or R₂ and R₃, together with the atom to which they are attached, form a heterocycle or carbocycle;

[0707] R₄ is selected from the group consisting of a C₃₋₆ carbocycle, —(CH₂)ₙQ, —(CH₂)ₙCHQR, —CHQR, —CQ(R)₂, and unsubstituted C₁₋₆ alkyl, where Q is selected from a C₃₋₆ carbocycle, a 5- to 14-membered heteroaryl having one or more heteroatoms selected from N, O, and S, —OR, —O(CH₂)ₙN(R)₂, —C(O)OR, —OC(O)R, —CX₃, —CX₂H, —CXH₂, —CN, —C(O)N(R)₂, —N(R)C(O)R, —N(R)S(O)₂R, —N(R)C(O)N(R)₂, —N(R)C(S)N(R)₂, —CRN(R)₂C(O)OR, and a 5- to 14-membered heterocycloalkyl having one or more heteroatoms selected from N, O, and S which is substituted with one or more substituents selected from oxo (═O), OH, amino, and C₁₋₃ alkyl, and each n is independently selected from 1, 2, 3, 4, and 5;

[0708] each R₅ is independently selected from the group consisting of C₁₋₃ alkyl, C₂₋₃ alkenyl, and H;

[0709] each R₆ is independently selected from the group consisting of C₁₋₃ alkyl, C₂₋₃ alkenyl, and H;

[0710] M and M′ are independently selected from —C(O)O—, —OC(O)—, —C(O)N(R′)—, —N(R′)C(O)—, —C(O)—, —C(S)—, —C(S)S—, —SC(S)—, —CH(OH)—, —P(O)(OR′)O—, —S(O)₂—, an aryl group, and a heteroaryl group;

[0711] R₇ is selected from the group consisting of C₁₋₃ alkyl, C₂₋₃ alkenyl, and H;

[0712] each R is independently selected from the group consisting of C₁₋₃ alkyl, C₂₋₃ alkenyl, and H;

[0713] each R′ is independently selected from the group consisting of C₁₋₁₈ alkyl, C₂₋₁₈ alkenyl, —R*YR″, —YR″, and H;

[0714] each R″ is independently selected from the group consisting of C₃₋₁₄ alkyl and C₃₋₁₄ alkenyl;

[0715] each R* is independently selected from the group consisting of C₁₋₁₂ alkyl and C₂₋₁₂ alkenyl;

[0716] each Y is independently a C₃₋₆ carbocycle;

[0717] each X is independently selected from the group consisting of F, Cl, Br, and I; and

[0718] m is selected from 5, 6, 7, 8, 9, 10, 11, 12, and 13,

[0719] or salts or stereoisomers thereof.

[0720] In yet another embodiments, another subset of compounds of Formula (I) includes those in which R₁ is selected from the group consisting of C₅₋₂₀ alkyl, C₅₋₂₀ alkenyl, —R*YR″, —YR″, and —R″M′R′;

[0721] R₂ and R₃ are independently selected from the group consisting of H, C₁₋₁₄ alkyl, C₂₋₁₄ alkenyl, —R*YR″, —YR″, and —R*OR″, or R₂ and R₃, together with the atom to which they are attached, form a heterocycle or carbocycle;

[0722] R₄ is selected from the group consisting of a C₃₋₆ carbocycle, —(CH₂)ₙQ, —(CH₂)ₙCHQR, —CHQR, —CQ(R)₂, and unsubstituted C₁₋₆ alkyl, where Q is selected from a C₃₋₆ carbocycle, a 5- to 14-membered heterocycle having one or more heteroatoms selected from N, O, and S, —OR, —O(CH₂)ₙN(R)₂, —C(O)OR, —OC(O)R, —CX₃, —CX₂H, —CXH₂, —CN, —C(O)N(R)₂, —N(R)C(O)R, —N(R)S(O)₂R, —N(R)C(O)N(R)₂, —N(R)C(S)N(R)₂, —CRN(R)₂C(O)OR, and each n is independently selected from 1, 2, 3, 4, and 5; and when Q is a 5- to 14-membered heterocycle and (i) R₄ is —(CH₂)ₙQ in which n is 1 or 2, or (ii) R₄ is —(CH₂)ₙCHQR in which n is 1, or (iii) R₄ is —CHQR, and —CQ(R)₂, then Q is either a 5- to 14-membered heteroaryl or 8- to 14-membered heterocycloalkyl;

[0723] each R₅ is independently selected from the group consisting of C₁₋₃ alkyl, C₂₋₃ alkenyl, and H;

[0724] each R₆ is independently selected from the group consisting of C₁₋₃ alkyl, C₂₋₃ alkenyl, and H;

[0725] M and M′ are independently selected from —C(O)O—, —OC(O)—, —C(O)N(R′)—, —N(R′)C(O)—, —C(O)—, —C(S)—, —C(S)S—, —SC(S)—, —CH(OH)—, —P(O)(OR′)O—, —S(O)₂—, an aryl group, and a heteroaryl group;

[0726] R₇ is selected from the group consisting of C₁₋₃ alkyl, C₂₋₃ alkenyl, and H;

[0727] each R is independently selected from the group consisting of C₁₋₃ alkyl, C₂₋₃ alkenyl, and H;

[0728] each R′ is independently selected from the group consisting of C₁₋₁₈ alkyl, C₂₋₁₈ alkenyl, —R*YR″, —YR″, and H;

[0729] each R″ is independently selected from the group consisting of C₃₋₁₄ alkyl and C₃₋₁₄ alkenyl;

[0730] each R* is independently selected from the group consisting of C₁₋₁₂ alkyl and C₂₋₁₂ alkenyl;

[0731] each Y is independently a C₃₋₆ carbocycle;

[0732] each X is independently selected from the group consisting of F, Cl, Br, and I; and

[0733] m is selected from 5, 6, 7, 8, 9, 10, 11, 12, and 13,

[0734] or salts or stereoisomers thereof.

[0735] In still another embodiments, another subset of compounds of Formula (I) includes those in which

[0736] R₁ is selected from the group consisting of C₅₋₂₀ alkyl, C₅₋₂₀ alkenyl, —R*YR″, —YR″, and —R″M′R′;

[0737] R₂ and R₃ are independently selected from the group consisting of H, C₁₋₁₄ alkyl, C₂₋₁₄ alkenyl, —R*YR″, —YR″, and —R*OR″, or R₂ and R₃, together with the atom to which they are attached, form a heterocycle or carbocycle;

[0738] R₄ is selected from the group consisting of a C₃₋₆ carbocycle, —(CH₂)ₙQ, —(CH₂)ₙCHQR, —CHQR, —CQ(R)₂, and unsubstituted C₁₋₆ alkyl, where Q is selected from a C₃₋₆ carbocycle, a 5- to 14-membered heteroaryl having one or more heteroatoms selected from N, O, and S, —OR, —O(CH₂)ₙN(R)₂, —C(O)OR, —OC(O)R, —CX₃, —CX₂H, —CXH₂, —CN, —C(O)N(R)₂, —N(R)C(O)R, —N(R)S(O)₂R, —N(R)C(O)N(R)₂, —N(R)C(S)N(R)₂, —CRN(R)₂C(O)OR, and each n is independently selected from 1, 2, 3, 4, and 5;

[0739] each R₅ is independently selected from the group consisting of C₁₋₃ alkyl, C₂₋₃ alkenyl, and H;

[0740] each R₆ is independently selected from the group consisting of C₁₋₃ alkyl, C₂₋₃ alkenyl, and H;

[0741] M and M′ are independently selected from —C(O)O—, —OC(O)—, —C(O)N(R′)—, —N(R′)C(O)—, —C(O)—, —C(S)—, —C(S)S—, —SC(S)—, —CH(OH)—, —P(O)(OR′)O—, —S(O)₂—, an aryl group, and a heteroaryl group;

[0742] R₇ is selected from the group consisting of C₁₋₃ alkyl, C₂₋₃ alkenyl, and H;

[0743] each R is independently selected from the group consisting of C₁₋₃ alkyl, C₂₋₃ alkenyl, and H;

[0744] each R′ is independently selected from the group consisting of C₁₋₁₈ alkyl, C₂₋₁₈ alkenyl, —R*YR″, —YR″, and H;

[0745] each R″ is independently selected from the group consisting of C₃₋₁₄ alkyl and C₃₋₁₄ alkenyl;

[0746] each R* is independently selected from the group consisting of C₁₋₁₂ alkyl and C₂₋₁₂ alkenyl;

[0747] each Y is independently a C₃₋₆ carbocycle;

[0748] each X is independently selected from the group consisting of F, Cl, Br, and I; and

[0749] m is selected from 5, 6, 7, 8, 9, 10, 11, 12, and 13,

[0750] or salts or stereoisomers thereof.

[0751] In yet another embodiments, another subset of compounds of Formula (I) includes those in which

[0752] R₁ is selected from the group consisting of C₅₋₂₀ alkyl, C₅₋₂₀ alkenyl, —R*YR″, —YR″, and —R″M′R′;

[0753] R₂ and R₃ are independently selected from the group consisting of H, C₂₋₁₄ alkyl, C₂₋₁₄ alkenyl, —R*YR″, —YR″, and —R*OR″, or R₂ and R₃, together with the atom to which they are attached, form a heterocycle or carbocycle;

[0754] R₄ is —(CH₂)ₙQ or —(CH₂)ₙCHQR, where Q is —N(R)₂, and n is selected from 3, 4, and 5;

[0755] each R₅ is independently selected from the group consisting of C₁₋₃ alkyl, C₂₋₃ alkenyl, and H;

[0756] each R₆ is independently selected from the group consisting of C₁₋₃ alkyl, C₂₋₃ alkenyl, and H;

[0757] M and M′ are independently selected from —C(O)O—, —OC(O)—, —C(O)N(R′)—, —N(R′)C(O)—, —C(O)—, —C(S)—, —C(S)S—, —SC(S)—, —CH(OH)—, —P(O)(OR′)O—, —S(O)₂—, an aryl group, and a heteroaryl group;

[0758] R₇ is selected from the group consisting of C₁₋₃ alkyl, C₂₋₃ alkenyl, and H;

[0759] each R is independently selected from the group consisting of C₁₋₃ alkyl, C₂₋₃ alkenyl, and H;

[0760] each R′ is independently selected from the group consisting of C₁₋₁₈ alkyl, C₂₋₁₈ alkenyl, —R*YR″, —YR″, and H;

[0761] each R″ is independently selected from the group consisting of C₃₋₁₄ alkyl and C₃₋₁₄ alkenyl;

[0762] each R* is independently selected from the group consisting of C₁₋₁₂ alkyl and C₁₋₁₂ alkenyl;

[0763] each Y is independently a C₃₋₆ carbocycle;

[0764] each X is independently selected from the group consisting of F, Cl, Br, and I; and

[0765] m is selected from 5, 6, 7, 8, 9, 10, 11, 12, and 13,

[0766] or salts or stereoisomers thereof.

[0767] In still another embodiments, another subset of compounds of Formula (I) includes those in which

[0768] R₁ is selected from the group consisting of C₅₋₂₀ alkyl, C₂₀ alkenyl, —R*YR″, —YR″, and —R″M′ R′;

[0769] R₂ and R₃ are independently selected from the group consisting of C₁₋₁₄ alkyl, C₂₋₁₄ alkenyl, —R*YR″, —YR″, and —R*OR″, or R₂ and R₃, together with the atom to which they are attached, form a heterocycle or carbocycle;

[0770] R₄ is selected from the group consisting of —(CH₂)ₙQ, —(CH₂)ₙCHQR, —CHQR, and —CQ(R)₂, where Q is —N(R)₂, and n is selected from 1, 2, 3, 4, and 5;

[0771] each R₅ is independently selected from the group consisting of C₁₋₃ alkyl, C₂₋₃ alkenyl, and H;

[0772] each R₆ is independently selected from the group consisting of C₁₋₃ alkyl, C₂₋₃ alkenyl, and H;

[0773] M and M′ are independently selected from —C(O)O—, —OC(O)—, —C(O)N(R′)—, —N(R′)C(O)—, —C(O)—, —C(S)—, —C(S)S—, —SC(S)—, —CH(OH)—, —P(O)(OR′)O—, —S(O)₂—, an aryl group, and a heteroaryl group;

[0774] R₇ is selected from the group consisting of C₁₋₃ alkyl, C₂₋₃ alkenyl, and H;

[0775] each R is independently selected from the group consisting of C₁₋₃ alkyl, C₂₋₃ alkenyl, and H;

[0776] each R′ is independently selected from the group consisting of C₁₋₁₈ alkyl, C₂₋₁₈ alkenyl, —R*YR″, —YR″, and H;

[0777] each R″ is independently selected from the group consisting of C₃₋₁₄ alkyl and C₃₋₁₄ alkenyl;

[0778] each R* is independently selected from the group consisting of C₁₋₁₂ alkyl and C₁₋₁₂ alkenyl;

[0779] each Y is independently a C₃₋₆ carbocycle;

[0780] each X is independently selected from the group consisting of F, Cl, Br, and I; and

[0781] m is selected from 5, 6, 7, 8, 9, 10, 11, 12, and 13,

[0782] or salts or stereoisomers thereof.

[0783] In certain embodiments, a subset of compounds of Formula (I) includes those of Formula (IA):

[chemical structure]

[0784] or a salt or stereoisomer thereof, wherein 1 is selected from 1, 2, 3, 4, and 5; m is selected from 5, 6, 7, 8, and 9; M₁ is a bond or M′; R₄ is unsubstituted C₁₋₃ alkyl, or —(CH₂)ₙQ, in which Q is OH, —NHC(S)N(R)₂, or —NHC(O)N(R)₂; M and M′ are independently selected from —C(O)O—, —OC(O)—, —C(O)N(R′)—, —P(O)(OR′)O—, an aryl group, and a heteroaryl group; and

[0785] R₂ and R₃ are independently selected from the group consisting of H, C₁₋₁₄ alkyl, and C₂₋₁₄ alkenyl.

[0786] In certain embodiments, a subset of compounds of Formula (I) includes those of Formula (II):

[chemical structure]

[0787] or a salt or stereoisomer thereof, wherein 1 is selected from 1, 2, 3, 4, and 5; M₁ is a bond or M′; R₄ is unsubstituted C₁₋₃ alkyl, or —(CH₂)ₙQ, in which n is 2, 3, or 4, and Q is OH, —NHC(S)N(R)₂, or —NHC(O)N(R)₂; M and M′ are independently selected from —C(O)O—, —OC(O)—, —C(O)N(R′)—, —P(O)(OR′)O—, an aryl group, and a heteroaryl group; and

[0788] R₂ and R₃ are independently selected from the group consisting of H, C₁₋₁₄ alkyl, and C₂₋₁₄ alkenyl.

[0789] In some embodiments, the compound of formula (I) is of the formula (IIa),

[chemical structure]

[0790] or a salt thereof, wherein R₄ is as described above.

[0791] In some embodiments, the compound of formula (I) is of the formula (IIb),

[chemical structure]

[0792] or a salt thereof, wherein R₄ is as described above.

[0793] In some embodiments, the compound of formula (I) is of the formula (IIc),

[chemical structure]

[0794] or a salt thereof, wherein R₄ is as described above.

[0795] In some embodiments, the compound of formula (I) is of the formula (IIe):

[chemical structure]

[0796] or a salt thereof, wherein R₄ is as described above.

[0797] In some embodiments, the compound of formula (IIa), (IIb), (IIc), or (IIe) comprises an R₄ which is selected from —(CH₂)ₙQ and —(CH₂)ₙCHQR, wherein Q, R and n are as defined above.

[0798] In some embodiments, Q is selected from the group consisting of —OR, —OH, —O(CH₂)ₙN(R)₂, —OC(O)R, —CX₃, —CN, —N(R)C(O)R, —N(H)C(O)R, —N(R)S(O)₂R, —N(H)S(O)₂R, —N(R)C(O)N(R)₂, —N(H)C(O)N(R)₂, —N(H)C(O)N(H)(R), —N(R)C(S)N(R)₂, —N(H)C(S)N(R)₂, —N(H)C(S)N(H)(R), and a heterocycle, wherein R is as defined above. In some aspects, n is 1 or 2. In some embodiments, Q is OH, —NHC(S)N(R)₂, or —NHC(O)N(R)₂.

[0799] In some embodiments, the compound of formula (I) is of the formula (IId),

[chemical structure]

[0800] or a salt thereof, wherein R₂ and R₃ are independently selected from the group consisting of C₅₋₁₄ alkyl and C₅₋₁₄ alkenyl, n is selected from 2, 3, and 4, and R′, R″, R₅, R₆ and m are as defined above.

[0801] In some aspects of the compound of formula (IId), R₂ is C₈ alkyl. In some aspects of the compound of formula (IId), R₃ is C₅-C₉ alkyl. In some aspects of the compound of formula (IId), m is 5, 7, or 9. In some aspects of the compound of formula (IId), each R₅ is H. In some aspects of the compound of formula (IId), each R₆ is H.

[0802] In another aspect, the present application provides a lipid composition (e.g., a lipid nanoparticle (LNP)) comprising: (1) a compound having the formula (I); (2) optionally a helper lipid (e.g. a phospholipid); (3) optionally a structural lipid (e.g. a sterol); (4) optionally a lipid conjugate (e.g. a PEG-lipid); and (5) optionally a quaternary amine compound. In exemplary embodiments, the lipid composition (e.g., LNP) further comprises a polynucleotide encoding a polypeptide (e.g., SteA-BH3 polypeptide), e.g., a polynucleotide encapsulated therein.

[0803] As used herein, the term “alkyl” or “alkyl group” means a linear or branched, saturated hydrocarbon including one or more carbon atoms (e.g., one, two, three, four, five, six, seven, eight, nine, ten, eleven, twelve, thirteen, fourteen, fifteen, sixteen, seventeen, eighteen, nineteen, twenty, or more carbon atoms).

[0804] The notation “C₁₋₁₄ alkyl” means a linear or branched, saturated hydrocarbon including 1-14 carbon atoms. An alkyl group can be optionally substituted.

[0805] As used herein, the term “alkenyl” or “alkenyl group” means a linear or branched hydrocarbon including two or more carbon atoms (e.g., two, three, four, five, six, seven, eight, nine, ten, eleven, twelve, thirteen, fourteen, fifteen, sixteen, seventeen, eighteen, nineteen, twenty, or more carbon atoms) and at least one double bond.

[0806] The notation “C₂₋₁₄ alkenyl” means a linear or branched hydrocarbon including 2-14 carbon atoms and at least one double bond. An alkenyl group can include one, two, three, four, or more double bonds. For example, C₁₈ alkenyl can include one or more double bonds. A C₁₈ alkenyl group including two double bonds can be a linoleyl group. An alkenyl group can be optionally substituted.

[0807] As used herein, the term “carbocycle” or “carbocyclic group” means a mono- or multi-cyclic system including one or more rings of carbon atoms. Rings can be three, four, five, six, seven, eight, nine, ten, eleven, twelve, thirteen, fourteen, or fifteen membered rings.

[0808] The notation “C₃₋₆ carbocycle” means a carbocycle including a single ring having 3-6 carbon atoms. Carbocycles can include one or more double bonds and can be aromatic (e.g., aryl groups). Examples of carbocycles include cyclopropyl, cyclopentyl, cyclohexyl, phenyl, naphthyl, and 1,2-dihydronaphthyl groups. Carbocycles can be optionally substituted.

[0809] As used herein, the term “heterocycle” or “heterocyclic group” means a mono- or multi-cyclic system including one or more rings, where at least one ring includes at least one heteroatom. Heteroatoms can be, for example, nitrogen, oxygen, or sulfur atoms. Rings can be three, four, five, six, seven, eight, nine, ten, eleven, or twelve membered rings. Heterocycles can include one or more double bonds and can be aromatic (e.g., heteroaryl groups). Examples of heterocycles include imidazolyl, imidazolidinyl, oxazolyl, oxazolidinyl, thiazolyl, thiazolidinyl, pyrazolidinyl, pyrazolyl, isoxazolidinyl, isoxazolyl, isothiazolidinyl, isothiazolyl, morpholinyl, pyrrolyl, pyrrolidinyl, furyl, tetrahydrofuryl, thiophenyl, pyridinyl, piperidinyl, quinolyl, and isoquinolyl groups. Heterocycles can be optionally substituted.

[0810] As used herein, a “biodegradable group” is a group that can facilitate faster metabolism of a lipid in a subject. A biodegradable group can be, but is not limited to, —C(O)O—, —OC(O)—, —C(O)N(R′)—, —N(R′)C(O)—, —C(O)—, —C(S)—, —C(S)S—, —SC(S)—, —CH(OH)—, —P(O)(OR′)O—, —S(O)₂—, an aryl group, and a heteroaryl group.

[0811] As used herein, an “aryl group” is a carbocyclic group including one or more aromatic rings. Examples of aryl groups include phenyl and naphthyl groups.

[0812] As used herein, a “heteroaryl group” is a heterocyclic group including one or more aromatic rings. Examples of heteroaryl groups include pyrrolyl, furyl, thiophenyl, imidazolyl, oxazolyl, and thiazolyl. Both aryl and heteroaryl groups can be optionally substituted. For example, M and M′ can be selected from the non-limiting group consisting of optionally substituted phenyl, oxazole, and thiazole. In the formulas herein, M and M′ can be independently selected from the list of biodegradable groups above.

[0813] Alkyl, alkenyl, and cyclyl (e.g., carbocyclyl and heterocyclyl) groups can be optionally substituted unless otherwise specified. Optional substituents can be selected from the group consisting of, but are not limited to, a halogen atom (e.g., a chloride, bromide, fluoride, or iodide group), a carboxylic acid (e.g., —C(O)OH), an alcohol (e.g., a hydroxyl, —OH), an ester (e.g., —C(O)OR or —OC(O)R), an aldehyde (e.g., —C(O)H), a carbonyl (e.g., —C(O)R, alternatively represented by C═O), an acyl halide (e.g., —C(O)X, in which X is a halide selected from bromide, fluoride, chloride, and iodide), a carbonate (e.g., —OC(O)OR), an alkoxy (e.g., —OR), an acetal (e.g., —C(OR)₂R″″, in which each OR are alkoxy groups that can be the same or different and R″″ is an alkyl or alkenyl group), a phosphate (e.g., P(O)₄³⁻), a thiol (e.g., —SH), a sulfoxide (e.g., —S(O)R), a sulfinic acid (e.g., —S(O)OH), a sulfonic acid (e.g., —S(O)₂OH), a thial (e.g., —C(S)H), a sulfate (e.g., S(O)₄²⁻), a sulfonyl (e.g., —S(O)₂—), an amide (e.g., —C(O)NR₂, or —N(R)C(O)R), an azido (e.g., —N₃), a nitro (e.g., —NO₂), a cyano (e.g., —CN), an isocyano (e.g., —NC), an acyloxy (e.g., —OC(O)R), an amino (e.g., —NR₂, —NRH, or —NH₂), a carbamoyl (e.g., —OC(O)NR₂, —OC(O)NRH, or —OC(O)NH₂), a sulfonamide (e.g., —S(O)₂NR₂, —S(O)₂NRH, —S(O)₂NH₂, —N(R)S(O)₂R, —N(H)S(O)₂R, —N(R)S(O)₂H, or —N(H)S(O)₂H), an alkyl group, an alkenyl group, and a cyclyl (e.g., carbocyclyl or heterocyclyl) group.

[0814] In any of the preceding, R is an alkyl or alkenyl group, as defined herein. In some embodiments, the substituent groups themselves can be further substituted with, for example, one, two, three, four, five, or six substituents as defined herein. For example, a C₁₋₆ alkyl group can be further substituted with one, two, three, four, five, or six substituents as described herein.

[0815] The compounds of any one of formulae (I), (IA), (II), (IIa), (IIb), (IIc), (IId), and (IIe) include one or more of the following features when applicable.

[0816] In some embodiments, R₄ is selected from the group consisting of a C₃₋₆ carbocycle, —(CH₂)ₙQ, —(CH₂)ₙCHQR, —CHQR, and —CQ(R)₂, where Q is selected from a C₃₋₆ carbocycle, 5- to 14-membered aromatic or non-aromatic heterocycle having one or more heteroatoms selected from N, O, S, and P, —OR, —O(CH₂)ₙN(R)₂, —C(O)OR, —OC(O)R, —CX₃, —CX₂H, —CXH₂, —CN, —N(R)₂, —C(O)N(R)₂, —N(R)C(O)R, —N(R)S(O)₂R, —N(R)C(O)N(R)₂, —N(R)C(S)N(R)₂, and —C(R)N(R)₂C(O)OR, and each n is independently selected from 1, 2, 3, 4, and 5.

[0817] In another embodiment, R₄ is selected from the group consisting of a C₃₋₆ carbocycle, —(CH₂)ₙQ, —(CH₂)ₙCHQR, —CHQR, and —CQ(R)₂, where Q is selected from a C₃₋₆ carbocycle, a 5- to 14-membered heteroaryl having one or more heteroatoms selected from N, O, and S, —OR, —O(CH₂)ₙN(R)₂, —C(O)OR, —OC(O)R, —CX₃, —CX₂H, —CXH₂, —CN, —C(O)N(R)₂, —N(R)C(O)R, —N(R)S(O)₂R, —N(R)C(O)N(R)₂, —N(R)C(S)N(R)₂, —C(R)N(R)₂C(O)OR, and a 5- to 14-membered heterocycloalkyl having one or more heteroatoms selected from N, O, and S which is substituted with one or more substituents selected from oxo (═O), OH, amino, and C₁₋₃ alkyl, and each n is independently selected from 1, 2, 3, 4, and 5.

[0818] In another embodiment, R₄ is selected from the group consisting of a C₃₋₆ carbocycle, —(CH₂)ₙQ, —(CH₂)ₙCHQR, —CHQR, and —CQ(R)₂, where Q is selected from a C₃₋₆ carbocycle, a 5- to 14-membered heterocycle having one or more heteroatoms selected from N, O, and S, —OR, —O(CH₂)ₙN(R)₂, —C(O)OR, —OC(O)R, —CX₃, —CX₂H, —CXH₂, —CN, —C(O)N(R)₂, —N(R)C(O)R, —N(R)S(O)₂R, —N(R)C(O)N(R)₂, —N(R)C(S)N(R)₂, —C(R)N(R)₂C(O)OR, and each n is independently selected from 1, 2, 3, 4, and 5; and when Q is a 5- to 14-membered heterocycle and (i) R₄ is —(CH₂)ₙQ in which n is 1 or 2, or (ii) R4 is —(CH₂)ₙCHQR in which n is 1, or (iii) R₄ is —CHQR, and —CQ(R)₂, then Q is either a 5- to 14-membered heteroaryl or 8- to 14-membered heterocycloalkyl.

[0819] In another embodiment, R₄ is selected from the group consisting of a C₃₋₆ carbocycle, —(CH₂)ₙQ, —(CH₂)ₙCHQR, —CHQR, and —CQ(R)₂, where Q is selected from a C₃₋₆ carbocycle, a 5- to 14-membered heteroaryl having one or more heteroatoms selected from N, O, and S, —OR, —O(CH₂)ₙN(R)₂, —C(O)OR, —OC(O)R, —CX₃, —CX₂H, —CXH₂, —CN, —C(O)N(R)₂, —N(R)C(O)R, —N(R)S(O)₂R, —N(R)C(O)N(R)₂, —N(R)C(S)N(R)₂, —C(R)N(R)₂C(O)OR, and each n is independently selected from 1, 2, 3, 4, and 5.

[0820] In another embodiment, R₄ is unsubstituted C₁₋₄ alkyl, e.g., unsubstituted methyl.

[0821] In certain embodiments, the disclosure provides a compound having the Formula (I), wherein R4 is —(CH₂)ₙQ or —(CH₂)ₙCHQR, where Q is —N(R)₂, and n is selected from 3, 4, and 5.

[0822] In certain embodiments, the disclosure provides a compound having the Formula (I), wherein R₄ is selected from the group consisting of —(CH₂)ₙQ, —(CH₂)ₙCHQR, —CHQR, and —CQ(R)₂, where Q is —N(R)₂, and n is selected from 1, 2, 3, 4, and 5.

[0823] In certain embodiments, the disclosure provides a compound having the Formula (I), wherein R₂ and R₃ are independently selected from the group consisting of C₂₋₁₄ alkyl, C₂₋₁₄ alkenyl, —R*YR″, —YR″, and —R*OR″, or R₂ and R₃, together with the atom to which they are attached, form a heterocycle or carbocycle, and R₄ is —(CH₂)ₙQ or —(CH₂)ₙCHQR, where Q is —N(R)₂, and n is selected from 3, 4, and 5.

[0824] In certain embodiments, R₂ and R₃ are independently selected from the group consisting of C₂₋₁₄ alkyl, C₂₋₁₄ alkenyl, —R*YR″, —YR″, and —R*OR″, or R₂ and R₃, together with the atom to which they are attached, form a heterocycle or carbocycle.

[0825] In some embodiments, R₁ is selected from the group consisting of C₅₋₂₀ alkyl and C₅₋₂₀ alkenyl.

[0826] In other embodiments, R₁ is selected from the group consisting of —R*YR″, —YR″, and —R″M′R′.

[0827] In certain embodiments, R₁ is selected from —R*YR″ and —YR″. In some embodiments, Y is a cyclopropyl group. In some embodiments, R* is C₈ alkyl or C₈ alkenyl. In certain embodiments, R″ is C₃₋₁₂ alkyl. For example, R″ can be C₃ alkyl. For example, R″ can be C₄₋₈ alkyl (e.g., C₄, C₅, C₆, C₇, or C₈ alkyl).

[0828] In some embodiments, R₁ is C₅₋₂₀ alkyl. In some embodiments, R₁ is C₆ alkyl. In some embodiments, R₁ is C₈ alkyl. In other embodiments, R₁ is C₉ alkyl. In certain embodiments, R₁ is C₁₄ alkyl. In other embodiments, R₁ is C₁₈ alkyl.

[0829] In some embodiments, R₁ is C₅₋₂₀ alkenyl. In certain embodiments, R₁ is C₁₈ alkenyl. In some embodiments, R₁ is linoleyl.

[0830] In certain embodiments, R₁ is branched (e.g., decan-2-yl, undecan-3-yl, dodecan-4-yl, tridecan-5-yl, tetradecan-6-yl, 2-methylundecan-3-yl, 2-methyldecan-2-yl, 3-methylundecan-3-yl, 4-methyldodecan-4-yl, or heptadeca-9-yl). In certain embodiments, R₁ is

[chemical structure]

[0831] In certain embodiments, R₁ is unsubstituted C₅₋₂₀ alkyl or C₅₋₂₀ alkenyl. In certain embodiments, R′ is substituted C₅₋₂₀ alkyl or C₅₋₂₀ alkenyl (e.g., substituted with a C₃₋₆ carbocycle such as 1-cyclopropylnonyl).

[0832] In other embodiments, R₁ is —R″M′R′.

[0833] In some embodiments, R′ is selected from —R*YR″ and —YR″. In some embodiments, Y is C₃₋₈ cycloalkyl. In some embodiments, Y is C₆₋₁₀ aryl. In some embodiments, Y is a cyclopropyl group. In some embodiments, Y is a cyclohexyl group.

[0834] In certain embodiments, R* is C₁ alkyl.

[0835] In some embodiments, R″ is selected from the group consisting of C₃₋₁₂ alkyl and C₃₋₁₂ alkenyl. In some embodiments, R″ adjacent to Y is C₁ alkyl. In some embodiments, R″ adjacent to Y is C₄₋₉ alkyl (e.g., C₄, C₅, C₆, C₇ or C₈ or C₉ alkyl).

[0836] In some embodiments, R′ is selected from C₄ alkyl and C₄ alkenyl. In certain embodiments, R′ is selected from C₅ alkyl and C₅ alkenyl. In some embodiments, R′ is selected from C₆ alkyl and C₆ alkenyl. In some embodiments, R′ is selected from C₇ alkyl and C₇ alkenyl.

[0837] In some embodiments, R′ is selected from C₉ alkyl and C₉ alkenyl.

[0838] In other embodiments, R′ is selected from C₁₁ alkyl and C₁₁ alkenyl. In other embodiments, R′ is selected from C₁₂ alkyl, C₁₂ alkenyl, C₁₃ alkyl, C₁₃ alkenyl, C₁₄ alkyl, C₁₄ alkenyl, C₁₅ alkyl, C₁₅ alkenyl, C₁₆ alkyl, C₁₆ alkenyl, C₁₇ alkyl, C₁₇ alkenyl, C₁₈ alkyl, and C₁₈ alkenyl. In certain embodiments, R′ is branched (e.g., decan-2-yl, undecan-3-yl, dodecan-4-yl, tridecan-5-yl, tetradecan-6-yl, 2-methylundecan-3-yl, 2-methyldecan-2-yl, 3-methylundecan-3-yl, 4-methyldodecan-4-yl or heptadeca-9-yl).

[0839] In certain embodiments, R′ is

[chemical structure]

[0840] In certain embodiments, R′ is unsubstituted C₁₋₁₈ alkyl. In certain embodiments, R′ is substituted C₁₋₁₈ alkyl (e.g., C₁₋₁₅ alkyl substituted with a C₃₋₆ carbocycle such as 1-cyclopropylnonyl).

[0841] In some embodiments, R″ is selected from the group consisting of C₃₋₁₄ alkyl and C₃₋₁₄ alkenyl. In some embodiments, R″ is C₃ alkyl, C₄ alkyl, C₅ alkyl, C₆ alkyl, C₇ alkyl, or C₈ alkyl. In some embodiments, R″ is C₉ alkyl, C₁₀ alkyl, C₁₁ alkyl, C₁₂ alkyl, C₁₃ alkyl, or C₁₄ alkyl.

[0842] In some embodiments, M′ is —C(O)O—. In some embodiments, M′ is —OC(O)—.

[0843] In other embodiments, M′ is an aryl group or heteroaryl group. For example, M′ can be selected from the group consisting of phenyl, oxazole, and thiazole.

[0844] In some embodiments, M is —C(O)O—. In some embodiments, M is —OC(O)—. In some embodiments, M is —C(O)N(R′)—. In some embodiments, M is —P(O)(OR′)O—.

[0845] In other embodiments, M is an aryl group or heteroaryl group. For example, M can be selected from the group consisting of phenyl, oxazole, and thiazole.

[0846] In some embodiments, M is the same as M′. In other embodiments, M is different from M′.

[0847] In some embodiments, each R₅ is H. In certain such embodiments, each R₆ is also H.

[0848] In some embodiments, R₇ is H. In other embodiments, R₇ is C₁₋₃ alkyl (e.g., methyl, ethyl, propyl, or i-propyl).

[0849] In some embodiments, R₂ and R₃ are independently C₅₋₁₄ alkyl or C₅₋₁₄ alkenyl.

[0850] In some embodiments, R₂ and R₃ are the same. In some embodiments, R₂ and R₃ are C₈ alkyl. In certain embodiments, R₂ and R₃ are C₂ alkyl. In other embodiments, R₂ and R₃ are C₃ alkyl. In some embodiments, R₂ and R₃ are C₄ alkyl. In certain embodiments, R₂ and R₃ are C₅ alkyl. In other embodiments, R₂ and R₃ are C₆ alkyl. In some embodiments, R₂ and R₃ are C₇ alkyl.

[0851] In other embodiments, R₂ and R₃ are different. In certain embodiments, R₂ is C₈ alkyl. In some embodiments, R₃ is C₁_7 (e.g., C₁, C₂, C₃, C₄, C₅, C₆, or C₇ alkyl) or C₉ alkyl.

[0852] In some embodiments, R₇ and R₃ are H.

[0853] In certain embodiments, R₂ is H.

[0854] In some embodiments, m is 5, 7, or 9.

[0855] In some embodiments, R₄ is selected from —(CH₂)ₙQ and —(CH₂)ₙCHQR.

[0856] In some embodiments, Q is selected from the group consisting of —OR, —OH, —O(CH₂)ₙN(R)₂, —OC(O)R, —CX₃, —CN, —N(R)C(O)R, —N(H)C(O)R, —N(R)S(O)₂R, —N(H)S(O)₂R, —N(R)C(O)N(R)₂, —N(H)C(O)N(R)₂, —N(H)C(O)N(H)(R), —N(R)C(S)N(R)₂, —N(H)C(S)N(R)₂, —N(H)C(S)N(H)(R), —C(R)N(R)₂C(O)OR, a carbocycle, and a heterocycle.

[0857] In certain embodiments, Q is —OH.

[0858] In certain embodiments, Q is a substituted or unsubstituted 5- to 10-membered heteroaryl, e.g., Q is an imidazole, a pyrimidine, a purine, 2-amino-1,9-dihydro-6H-purin-6-one-9-yl (or guanin-9-yl), adenin-9-yl, cytosin-1-yl, or uracil-1-yl. In certain embodiments, Q is a substituted 5- to 14-membered heterocycloalkyl, e.g., substituted with one or more substituents selected from oxo (═O), OH, amino, and C₁₋₃ alkyl. For example, Q is 4-methylpiperazinyl, 4-(4-methoxybenzyl)piperazinyl, or isoindolin-2-yl-1,3-dione.

[0859] In certain embodiments, Q is an unsubstituted or substituted C₆₋₁₀ aryl (such as phenyl) or C₃₋₆ cycloalkyl.

[0860] In some embodiments, n is 1. In other embodiments, n is 2. In further embodiments, n is 3. In certain other embodiments, n is 4. For example, R₄ can be —(CH₂)₂OH. For example, R₄ can be —(CH₂)₃OH. For example, R₄ can be —(CH₂)₄OH. For example, R₄ can be benzyl. For example, R₄ can be 4-methoxybenzyl.

[0861] In some embodiments, R₄ is a C₃₋₆ carbocycle. In some embodiments, R₄ is a C₃₋₆ cycloalkyl. For example, R₄ can be cyclohexyl optionally substituted with e.g., OH, halo, C₁₋₆ alkyl, etc. For example, R₄ can be 2-hydroxycyclohexyl.

[0862] In some embodiments, R is H.

[0863] In some embodiments, R is unsubstituted C₁₋₃ alkyl or unsubstituted C₂₋₃ alkenyl. For example, R₄ can be —CH₂CH(OH)CH₃ or —CH₂CH(OH)CH₂CH₃.

[0864] In some embodiments, R is substituted C₁₋₃ alkyl, e.g., CH₂OH. For example, R₄ can be —CH₂CH(OH)CH₂OH.

[0865] In some embodiments, R₂ and R₃, together with the atom to which they are attached, form a heterocycle or carbocycle. In some embodiments, R₂ and R₃, together with the atom to which they are attached, form a 5- to 14-membered aromatic or non-aromatic heterocycle having one or more heteroatoms selected from N, O, S, and P. In some embodiments, R₂ and R₃, together with the atom to which they are attached, form an optionally substituted C₃₋₂₀ carbocycle (e.g., C₃₋₁₈ carbocycle, C₃₋₁₅ carbocycle, C₃₋₁₂ carbocycle, or C₃₋₁₀ carbocycle), either aromatic or non-aromatic. In some embodiments, R₂ and R₃, together with the atom to which they are attached, form a C₃₋₆ carbocycle. In other embodiments, R₂ and R₃, together with the atom to which they are attached, form a C₆ carbocycle, such as a cyclohexyl or phenyl group. In certain embodiments, the heterocycle or C₃₋₆ carbocycle is substituted with one or more alkyl groups (e.g., at the same ring atom or at adjacent or non-adjacent ring atoms). For example, R₂ and R₃, together with the atom to which they are attached, can form a cyclohexyl or phenyl group bearing one or more C₅ alkyl substitutions. In certain embodiments, the heterocycle or C₃₋₆ carbocycle formed by R₂ and R₃, is substituted with a carbocycle groups. For example, R₂ and R₃, together with the atom to which they are attached, can form a cyclohexyl or phenyl group that is substituted with cyclohexyl. In some embodiments, R₂ and R₃, together with the atom to which they are attached, form a C₇₋₁₅ carbocycle, such as a cycloheptyl, cyclopentadecanyl, or naphthyl group.

[0866] In some embodiments, R₄ is selected from —(CH₂)ₙQ and —(CH₂)ₙCHQR. In some embodiments, Q is selected from the group consisting of —OR, —OH, —O(CH₂)ₙN(R)₂, —OC(O)R, —CX₃, —CN, —N(R)C(O)R, —N(H)C(O)R, —N(R)S(O)₂R, —N(H)S(O)₂R, —N(R)C(O)N(R)₂, —N(H)C(O)N(R)₂, —N(H)C(O)N(H)(R), —N(R)C(S)N(R)₂, —N(H)C(S)N(R)₂, —N(H)C(S)N(H)(R), and a heterocycle. In other embodiments, Q is selected from the group consisting of an imidazole, a pyrimidine, and a purine.

[0867] In some embodiments, R₂ and R₃, together with the atom to which they are attached, form a heterocycle or carbocycle. In some embodiments, R₂ and R₃, together with the atom to which they are attached, form a C₃₋₆ carbocycle, such as a phenyl group. In certain embodiments, the heterocycle or C₃₋₆ carbocycle is substituted with one or more alkyl groups (e.g., at the same ring atom or at adjacent or non-adjacent ring atoms). For example, R₂ and R₃, together with the atom to which they are attached, can form a phenyl group bearing one or more C₅ alkyl substitutions.

[0868] In some embodiments, the pharmaceutical compositions of the present disclosure, the compound of formula (I) is selected from the group consisting of:

[chemical structure]

[chemical structure]

[chemical structure]

[chemical structure]

[chemical structure]

[chemical structure]

[chemical structure]

[chemical structure]

[chemical structure]

[chemical structure]

[chemical structure]

[chemical structure]

[chemical structure]

[chemical structure]

[chemical structure]

[chemical structure]

[chemical structure]

[chemical structure]

[chemical structure]

[chemical structure]

[chemical structure]

[chemical structure]

[chemical structure]

[0869] and salts or stereoisomers thereof.

[0870] The central amine moiety of a lipid according to formula (I) is typically protonated (i.e., positively charged) at a pH below the pKa of the amino moiety and is substantially not charged at a pH above the pKa. Such lipids can be referred to ionizable amino lipids.

[0871] In one specific embodiment, the compound of formula (I) is Compound 18.

[0872] In some embodiments, the amount the compound of formula (I) ranges from about 1 mol % to 99 mol % in the lipid composition.

[0873] In one embodiment, the amount of compound of formula (I) is at least about 1, 2, 3, 4, 5, 6, 7, 8, 9, 10, 11, 12, 13, 14, 15, 16, 17, 18, 19, 20, 21, 22, 23, 24, 25, 26, 27, 28, 29, 30, 31, 32, 33, 34, 35, 36, 37, 38, 39, 40, 41, 42, 43, 44, 45, 46, 47, 48, 49, 50, 51, 52, 53, 54, 55, 56, 57, 58, 59, 60, 61, 62, 63, 64, 65, 66, 67, 68, 69, 70, 71, 72, 73, 74, 75, 76, 77, 78, 79, 80, 81, 82, 83, 84, 85, 86, 87, 88, 89, 90, 91, 92, 93, 94, 95, 96, 97, 98, or 99 mol % in the lipid composition.

[0874] In one embodiment, the amount of the compound of formula (I) ranges from about 30 mol % to about 70 mol %, from about 35 mol % to about 65 mol %, from about 40 mol % to about 60 mol %, and from about 45 mol % to about 55 mol % in the lipid composition.

[0875] In one specific embodiment, the amount of the compound of formula (I) is about 50 mol % in the lipid composition.

[0876] In addition to the compound of formula (I), the lipid composition of the pharmaceutical compositions disclosed herein can comprise additional components such as phospholipids, structural lipids, quaternary amine compounds, PEG-lipids, and any combination thereof.

[0877] b. Additional Components in the Lipid Composition

[0878] (i) Phospholipids

[0879] The lipid composition of the pharmaceutical composition disclosed herein can comprise one or more phospholipids, for example, one or more saturated or (poly)unsaturated phospholipids or a combination thereof. In general, phospholipids comprise a phospholipid moiety and one or more fatty acid moieties. For example, a phospholipid can be a lipid according to formula (III):

[chemical structure]

in which Rₚ represents a phospholipid moiety and R₁ and R₂ represent fatty acid moieties with or without unsaturation that can be the same or different.

[0880] A phospholipid moiety can be selected, for example, from the non-limiting group consisting of phosphatidyl choline, phosphatidyl ethanolamine, phosphatidyl glycerol, phosphatidyl serine, phosphatidic acid, 2-lysophosphatidyl choline, and a sphingomyelin.

[0881] A fatty acid moiety can be selected, for example, from the non-limiting group consisting of lauric acid, myristic acid, myristoleic acid, palmitic acid, palmitoleic acid, stearic acid, oleic acid, linoleic acid, alpha-linolenic acid, erucic acid, phytanoic acid, arachidic acid, arachidonic acid, eicosapentaenoic acid, behenic acid, docosapentaenoic acid, and docosahexaenoic acid.

[0882] Particular phospholipids can facilitate fusion to a membrane. For example, a cationic phospholipid can interact with one or more negatively charged phospholipids of a membrane (e.g., a cellular or intracellular membrane). Fusion of a phospholipid to a membrane can allow one or more elements (e.g., a therapeutic agent) of a lipid-containing composition (e.g., LNPs) to pass through the membrane permitting, e.g., delivery of the one or more elements to a target tissue (e.g., tumoral tissue).

[0883] Non-natural phospholipid species including natural species with modifications and substitutions including branching, oxidation, cyclization, and alkynes are also contemplated. For example, a phospholipid can be functionalized with or cross-linked to one or more alkynes (e.g., an alkenyl group in which one or more double bonds is replaced with a triple bond). Under appropriate reaction conditions, an alkyne group can undergo a copper-catalyzed cycloaddition upon exposure to an azide. Such reactions can be useful in functionalizing a lipid bilayer of a nanoparticle composition to facilitate membrane permeation or cellular recognition or in conjugating a nanoparticle composition to a useful component such as a targeting or imaging moiety (e.g., a dye).

[0884] Phospholipids include, but are not limited to, glycerophospholipids such as phosphatidylcholines, phosphatidylethanolamines, phosphatidylserines, phosphatidylinositols, phosphatidy glycerols, and phosphatidic acids. Phospholipids also include phosphosphingolipid, such as sphingomyelin. In some embodiments, a pharmaceutical composition for intratumoral delivery disclosed herein can comprise more than one phospholipid. When more than one phospholipid is used, such phospholipids can belong to the same phospholipid class (e.g., MSPC and DSPC) or different classes (e.g., MSPC and MSPE).

[0885] Phospholipids can be of a symmetric or an asymmetric type. As used herein, the term “symmetric phospholipid” includes glycerophospholipids having matching fatty acid moieties and sphingolipids in which the variable fatty acid moiety and the hydrocarbon chain of the sphingosine backbone include a comparable number of carbon atoms. As used herein, the term “asymmetric phospholipid” includes lysolipids, glycerophospholipids having different fatty acid moieties (e.g., fatty acid moieties with different numbers of carbon atoms and/or unsaturations (e.g., double bonds)), and sphingolipids in which the variable fatty acid moiety and the hydrocarbon chain of the sphingosine backbone include a dissimilar number of carbon atoms (e.g., the variable fatty acid moiety include at least two more carbon atoms than the hydrocarbon chain or at least two fewer carbon atoms than the hydrocarbon chain).

[0886] In some embodiments, the lipid composition of a pharmaceutical composition disclosed herein comprises at least one symmetric phospholipid. Symmetric phospholipids can be selected from the non-limiting group consisting of
[0887] 1,2-dipropionyl-sn-glycero-3-phosphocholine (03:0 PC),
[0888] 1,2-dibutyryl-sn-glycero-3-phosphocholine (04:0 PC),
[0889] 1,2-dipentanoyl-sn-glycero-3-phosphocholine (05:0 PC),
[0890] 1,2-dihexanoyl-sn-glycero-3-phosphocholine (06:0 PC),
[0891] 1,2-diheptanoyl-sn-glycero-3-phosphocholine (07:0 PC),
[0892] 1,2-dioctanoyl-sn-glycero-3-phosphocholine (08:0 PC),
[0893] 1,2-dinonanoyl-sn-glycero-3-phosphocholine (09:0 PC),
[0894] 1,2-didecanoyl-sn-glycero-3-phosphocholine (10:0 PC),
[0895] 1,2-diundecanoyl-sn-glycero-3-phosphocholine (11:0 PC, DUPC),
[0896] 1,2-dilauroyl-sn-glycero-3-phosphocholine (12:0 PC),
[0897] 1,2-ditridecanoyl-sn-glycero-3-phosphocholine (13:0 PC),
[0898] 1,2-dimyristoyl-sn-glycero-3-phosphocholine (14:0 PC, DMPC),
[0899] 1,2-dipentadecanoyl-sn-glycero-3-phosphocholine (15:0 PC),
[0900] 1,2-dipalmitoyl-sn-glycero-3-phosphocholine (16:0 PC, DPPC),
[0901] 1,2-diphytanoyl-sn-glycero-3-phosphocholine (4ME 16:0 PC),
[0902] 1,2-diheptadecanoyl-sn-glycero-3-phosphocholine (17:0 PC),
[0903] 1,2-distearoyl-sn-glycero-3-phosphocholine (18:0 PC, DSPC),
[0904] 1,2-dinonadecanoyl-sn-glycero-3-phosphocholine (19:0 PC),
[0905] 1,2-diarachidoyl-sn-glycero-3-phosphocholine (20:0 PC),
[0906] 1,2-dihenarachidoyl-sn-glycero-3-phosphocholine (21:0 PC),
[0907] 1,2-dibehenoyl-sn-glycero-3-phosphocholine (22:0 PC),
[0908] 1,2-ditricosanoyl-sn-glycero-3-phosphocholine (23:0 PC),
[0909] 1,2-dilignoceroyl-sn-glycero-3-phosphocholine (24:0 PC),
[0910] 1,2-dimyristoleoyl-sn-glycero-3-phosphocholine (14:1 (Δ9-Cis) PC),
[0911] 1,2-dimyristelaidoyl-sn-glycero-3-phosphocholine (14:1 (Δ9-Trans) PC),
[0912] 1,2-dipalmitoleoyl-sn-glycero-3-phosphocholine (16:1 (Δ9-Cis) PC),
[0913] 1,2-dipalmitelaidoyl-sn-glycero-3-phosphocholine (16:1 (Δ9-Trans) PC),
[0914] 1,2-dipetroselenoyl-sn-glycero-3-phosphocholine (18:1 (A6-Cis) PC),
[0915] 1,2-dioleoyl-sn-glycero-3-phosphocholine (18:1 (Δ9-Cis) PC, DOPC),
[0916] 1,2-dielaidoyl-sn-glycero-3-phosphocholine (18:1 (Δ9-Trans) PC),
[0917] 1,2-dilinoleoyl-sn-glycero-3-phosphocholine (18:2 (Cis) PC, DLPC),
[0918] 1,2-dilinolenoyl-sn-glycero-3-phosphocholine (18:3 (Cis) PC, DLnPC),
[0919] 1,2-dieicosenoyl-sn-glycero-3-phosphocholine (20:1 (Cis) PC),
[0920] 1,2-diarachidonoyl-sn-glycero-3-phosphocholine (20:4 (Cis) PC, DAPC),
[0921] 1,2-dierucoyl-sn-glycero-3-phosphocholine (22:1 (Cis) PC),
[0922] 1,2-didocosahexaenoyl-sn-glycero-3-phosphocholine (22:6 (Cis) PC, DHAPC),
[0923] 1,2-dinervonoyl-sn-glycero-3-phosphocholine (24:1 (Cis) PC),
[0924] 1,2-dihexanoyl-sn-glycero-3-phosphoethanolamine (06:0 PE),
[0925] 1,2-dioctanoyl-sn-glycero-3-phosphoethanolamine (08:0 PE),
[0926] 1,2-didecanoyl-sn-glycero-3-phosphoethanolamine (10:0 PE),
[0927] 1,2-dilauroyl-sn-glycero-3-phosphoethanolamine (12:0 PE),
[0928] 1,2-dimyristoyl-sn-glycero-3-phosphoethanolamine (14:0 PE),
[0929] 1,2-dipentadecanoyl-sn-glycero-3-phosphoethanolamine (15:0 PE),
[0930] 1,2-dipalmitoyl-sn-glycero-3-phosphoethanolamine (16:0 PE),
[0931] 1,2-diphytanoyl-sn-glycero-3-phosphoethanolamine (4ME 16:0 PE),
[0932] 1,2-diheptadecanoyl-sn-glycero-3-phosphoethanolamine (17:0 PE),
[0933] 1,2-distearoyl-sn-glycero-3-phosphoethanolamine (18:0 PE, DSPE),
[0934] 1,2-dipalmitoleoyl-sn-glycero-3-phosphoethanolamine (16:1 PE),
[0935] 1,2-dioleoyl-sn-glycero-3-phosphoethanolamine (18:1 (Δ9-Cis) PE, DOPE),
[0936] 1,2-dielaidoyl-sn-glycero-3-phosphoethanolamine (18:1 (Δ9-Trans) PE),
[0937] 1,2-dilinoleoyl-sn-glycero-3-phosphoethanolamine (18:2 PE, DLPE),
[0938] 1,2-dilinolenoyl-sn-glycero-3-phosphoethanolamine (18:3 PE, DLnPE),
[0939] 1,2-diarachidonoyl-sn-glycero-3-phosphoethanolamine (20:4 PE, DAPE),
[0940] 1,2-didocosahexaenoyl-sn-glycero-3-phosphoethanolamine (22:6 PE, DHAPE),
[0941] 1,2-di-O-octadecenyl-sn-glycero-3-phosphocholine (18:0 Diether PC),
[0942] 1,2-dioleoyl-sn-glycero-3-phospho-rac-(1-glycerol) sodium salt (DOPG), and any combination thereof.

[0943] In some embodiments, the lipid composition of a pharmaceutical composition disclosed herein comprises at least one symmetric phospholipid selected from the non-limiting group consisting of DLPC, DMPC, DOPC, DPPC, DSPC, DUPC, 18:0 Diether PC, DLnPC, DAPC, DHAPC, DOPE, 4ME 16:0 PE, DSPE, DLPE, DLnPE, DAPE, DHAPE, DOPG, and any combination thereof.

[0944] In some embodiments, the lipid composition of a pharmaceutical composition disclosed herein comprises at least one asymmetric phospholipid. Asymmetric phospholipids can be selected from the non-limiting group consisting of
[0945] 1-myristoyl-2-palmitoyl-sn-glycero-3-phosphocholine (14:0-16:0 PC, MPPC),
[0946] 1-myristoyl-2-stearoyl-sn-glycero-3-phosphocholine (14:0-18:0 PC, MSPC),
[0947] 1-palmitoyl-2-acetyl-sn-glycero-3-phosphocholine (16:0-02:0 PC),
[0948] 1-palmitoyl-2-myristoyl-sn-glycero-3-phosphocholine (16:0-14:0 PC, PMPC),
[0949] 1-palmitoyl-2-stearoyl-sn-glycero-3-phosphocholine (16:0-18:0 PC, PSPC),
[0950] 1-palmitoyl-2-oleoyl-sn-glycero-3-phosphocholine (16:0-18:1 PC, POPC),
[0951] 1-palmitoyl-2-linoleoyl-sn-glycero-3-phosphocholine (16:0-18:2 PC, PLPC),
[0952] 1-palmitoyl-2-arachidonoyl-sn-glycero-3-phosphocholine (16:0-20:4 PC),
[0953] 1-palmitoyl-2-docosahexaenoyl-sn-glycero-3-phosphocholine (14:0-22:6 PC),
[0954] 1-stearoyl-2-myristoyl-sn-glycero-3-phosphocholine (18:0-14:0 PC, SMPC),
[0955] 1-stearoyl-2-palmitoyl-sn-glycero-3-phosphocholine (18:0-16:0 PC, SPPC),
[0956] 1-stearoyl-2-oleoyl-sn-glycero-3-phosphocholine (18:0-18:1 PC, SOPC),
[0957] 1-stearoyl-2-linoleoyl-sn-glycero-3-phosphocholine (18:0-18:2 PC),
[0958] 1-stearoyl-2-arachidonoyl-sn-glycero-3-phosphocholine (18:0-20:4 PC),
[0959] 1-stearoyl-2-docosahexaenoyl-sn-glycero-3-phosphocholine (18:0-22:6 PC),
[0960] 1-oleoyl-2-myristoyl-sn-glycero-3-phosphocholine (18:1-14:0 PC, OMPC),
[0961] 1-oleoyl-2-palmitoyl-sn-glycero-3-phosphocholine (18:1-16:0 PC, OPPC),
[0962] 1-oleoyl-2-stearoyl-sn-glycero-3-phosphocholine (18:1-18:0 PC, OSPC),
[0963] 1-palmitoyl-2-oleoyl-sn-glycero-3-phosphoethanolamine (16:0-18:1 PE, POPE),
[0964] 1-palmitoyl-2-linoleoyl-sn-glycero-3-phosphoethanolamine (16:0-18:2 PE),
[0965] 1-palmitoyl-2-arachidonoyl-sn-glycero-3-phosphoethanolamine (16:0-20:4 PE),
[0966] 1-palmitoyl-2-docosahexaenoyl-sn-glycero-3-phosphoethanolamine (16:0-22:6 PE),
[0967] 1-stearoyl-2-oleoyl-sn-glycero-3-phosphoethanolamine (18:0-18:1 PE),
[0968] 1-stearoyl-2-linoleoyl-sn-glycero-3-phosphoethanolamine (18:0-18:2 PE),
[0969] 1-stearoyl-2-arachidonoyl-sn-glycero-3-phosphoethanolamine (18:0-20:4 PE),
[0970] 1-stearoyl-2-docosahexaenoyl-sn-glycero-3-phosphoethanolamine (18:0-22:6 PE),
[0971] 1-oleoyl-2-cholesterylhemisuccinoyl-sn-glycero-3-phosphocholine (OChemsPC), and
[0972] any combination thereof.

[0973] Asymmetric lipids useful in the lipid composition can also be lysolipids. Lysolipids can be selected from the non-limiting group consisting of
[0974] 1-hexanoyl-2-hydroxy-sn-glycero-3-phosphocholine (06:0 Lyso PC),
[0975] 1-heptanoyl-2-hydroxy-sn-glycero-3-phosphocholine (07:0 Lyso PC),
[0976] 1-octanoyl-2-hydroxy-sn-glycero-3-phosphocholine (08:0 Lyso PC),
[0977] 1-nonanoyl-2-hydroxy-sn-glycero-3-phosphocholine (09:0 Lyso PC),
[0978] 1-decanoyl-2-hydroxy-sn-glycero-3-phosphocholine (10:0 Lyso PC),
[0979] 1-undecanoyl-2-hydroxy-sn-glycero-3-phosphocholine (11:0 Lyso PC),
[0980] 1-lauroyl-2-hydroxy-sn-glycero-3-phosphocholine (12:0 Lyso PC),
[0981] 1-tridecanoyl-2-hydroxy-sn-glycero-3-phosphocholine (13:0 Lyso PC),
[0982] 1-myristoyl-2-hydroxy-sn-glycero-3-phosphocholine (14:0 Lyso PC),
[0983] 1-pentadecanoyl-2-hydroxy-sn-glycero-3-phosphocholine (15:0 Lyso PC),
[0984] 1-palmitoyl-2-hydroxy-sn-glycero-3-phosphocholine (16:0 Lyso PC),
[0985] 1-heptadecanoyl-2-hydroxy-sn-glycero-3-phosphocholine (17:0 Lyso PC),
[0986] 1-stearoyl-2-hydroxy-sn-glycero-3-phosphocholine (18:0 Lyso PC),
[0987] 1-oleoyl-2-hydroxy-sn-glycero-3-phosphocholine (18:1 Lyso PC),
[0988] 1-nonadecanoyl-2-hydroxy-sn-glycero-3-phosphocholine (19:0 Lyso PC),
[0989] 1-arachidoyl-2-hydroxy-sn-glycero-3-phosphocholine (20:0 Lyso PC),
[0990] 1-behenoyl-2-hydroxy-sn-glycero-3-phosphocholine (22:0 Lyso PC),
[0991] 1-lignoceroyl-2-hydroxy-sn-glycero-3-phosphocholine (24:0 Lyso PC),
[0992] 1-hexacosanoyl-2-hydroxy-sn-glycero-3-phosphocholine (26:0 Lyso PC),
[0993] 1-myristoyl-2-hydroxy-sn-glycero-3-phosphoethanolamine (14:0 Lyso PE),
[0994] 1-palmitoyl-2-hydroxy-sn-glycero-3-phosphoethanolamine (16:0 Lyso PE),
[0995] 1-stearoyl-2-hydroxy-sn-glycero-3-phosphoethanolamine (18:0 Lyso PE),
[0996] 1-oleoyl-2-hydroxy-sn-glycero-3-phosphoethanolamine (18:1 Lyso PE),
[0997] 1-hexadecyl-sn-glycero-3-phosphocholine (C16 Lyso PC), and
[0998] any combination thereof.

[0999] In some embodiment, the lipid composition of a pharmaceutical composition disclosed herein comprises at least one asymmetric phospholipid selected from the group consisting of MPPC, MSPC, PMPC, PSPC, SMPC, SPPC, and any combination thereof. In some embodiments, the asymmetric phospholipid is 1-myristoyl-2-stearoyl-sn-glycero-3-phosphocholine (MSPC).

[1000] In some embodiments, the lipid compositions disclosed herein can contain one or more symmetric phospholipids, one or more asymmetric phospholipids, or a combination thereof. When multiple phospholipids are present, they can be present in equimolar ratios, or non-equimolar ratios.

[1001] In one embodiment, the lipid composition of a pharmaceutical composition disclosed herein comprises a total amount of phospholipid (e.g., MSPC) which ranges from about 1 mol % to about 20 mol %, from about 5 mol % to about 20 mol %, from about 10 mol % to about 20 mol %, from about 15 mol % to about 20 mol %, from about 1 mol % to about 15 mol %, from about 5 mol % to about 15 mol %, from about 10 mol % to about 15 mol %, from about 5 mol % to about 10 mol % in the lipid composition. In one embodiment, the amount of the phospholipid is from about 8 mol % to about 15 mol % in the lipid composition. In one embodiment, the amount of the phospholipid (e.g., MSPC) is about 10 mol % in the lipid composition.

[1002] In some aspects, the amount of a specific phospholipid (e.g., MSPC) is at least about 1, 2, 3, 4, 5, 6, 7, 8, 9, 10, 11, 12, 13, 14, 15, 16, 17, 18, 19 or 20 mol % in the lipid composition.

[1003] (ii) Quaternary Amine Compounds

[1004] The lipid composition of a pharmaceutical composition disclosed herein can comprise one or more quaternary amine compounds (e.g., DOTAP). The term “quaternary amine compound” is used to include those compounds having one or more quaternary amine groups (e.g., trialkylamino groups) and permanently carrying a positive charge and existing in a form of a salt. For example, the one or more quaternary amine groups can be present in a lipid or a polymer (e.g., PEG). In some embodiments, the quaternary amine compound comprises (1) a quaternary amine group and (2) at least one hydrophobic tail group comprising (i) a hydrocarbon chain, linear or branched, and saturated or unsaturated, and (ii) optionally an ether, ester, carbonyl, or ketal linkage between the quaternary amine group and the hydrocarbon chain. In some embodiments, the quaternary amine group can be a trimethylammonium group. In some embodiments, the quaternary amine compound comprises two identical hydrocarbon chains. In some embodiments, the quaternary amine compound comprises two different hydrocarbon chains.

[1005] In some embodiments, the lipid composition of a pharmaceutical composition disclosed herein comprises at least one quaternary amine compound. Quaternary amine compound can be selected from the non-limiting group consisting of
[1006] 1,2-dioleoyl-3-trimethylammonium-propane (DOTAP),
[1007] N-[1-(2,3-dioleoyloxy)propyl]-N,N,N-trimethylammonium chloride (DOTMA),
[1008] 1-[2-(oleoyloxy)ethyl]-2-oleyl-3-(2-hydroxyethyl)imidazolinium chloride (DOTIM),
[1009] 2,3-dioleyloxy-N-[2(sperminecarboxamido)ethyl]-N,N-dimethyl-1-propanaminium trifluoroacetate (DOSPA),
[1010] N,N-distearyl-N,N-dimethylammonium bromide (DDAB),
[1011] N-(1,2-dimyristyloxyprop-3-yl)-N,N-dimethyl-N-hydroxyethyl ammonium bromide (DMRIE),
[1012] N-(1,2-dioleoyloxyprop-3-yl)-N,N-dimethyl-N-hydroxyethyl ammonium bromide (DORIE),
[1013] N,N-dioleyl-N,N-dimethylammonium chloride (DODAC),
[1014] 1,2-dilauroyl-sn-glycero-3-ethylphosphocholine (DLePC),
[1015] 1,2-distearoyl-3-trimethylammonium-propane (DSTAP),
[1016] 1,2-dipalmitoyl-3-trimethylammonium-propane (DPTAP),
[1017] 1,2-dilinoleoyl-3-trimethylammonium-propane (DLTAP),
[1018] 1,2-dimyristoyl-3-trimethylammonium-propane (DMTAP)
[1019] 1,2-distearoyl-sn-glycero-3-ethylphosphocholine (DSePC)
[1020] 1,2-dipalmitoyl-sn-glycero-3-ethylphosphocholine (DPePC),
[1021] 1,2-dimyristoyl-sn-glycero-3-ethylphosphocholine (DMePC),
[1022] 1,2-dioleoyl-sn-glycero-3-ethylphosphocholine (DOePC),
[1023] 1,2-di-(9Z-tetradecenoyl)-sn-glycero-3-ethylphosphocholine (14:1 EPC),
[1024] 1-palmitoyl-2-oleoyl-sn-glycero-3-ethylphosphocholine (16:0-18:1 EPC),
[1025] and any combination thereof.

[1026] In one embodiment, the quaternary amine compound is 1,2-dioleoyl-3-trimethylammonium-propane (DOTAP).

[1027] Quaternary amine compounds are known in the art, such as those described in US 2013/0245107 A1, US 2014/0363493 A1, U.S. Pat. No. 8,158,601, WO 2015/123264 A1, and WO 2015/148247 A1, which are incorporated herein by reference in their entirety.

[1028] In one embodiment, the amount of the quaternary amine compound (e.g., DOTAP) in the lipid composition disclosed herein ranges from about 0.01 mol % to about 20 mol %.

[1029] In one embodiment, the amount of the quaternary amine compound (e.g., DOTAP) in the lipid composition disclosed herein ranges from about 0.5 mol % to about 20 mol %, from about 0.5 mol % to about 15 mol %, from about 0.5 mol % to about 10 mol %, from about 1 mol % to about 20 mol %, from about 1 mol % to about 15 mol %, from about 1 mol % to about 10 mol %, from about 2 mol % to about 20 mol %, from about 2 mol % to about 15 mol %, from about 2 mol % to about 10 mol %, from about 3 mol % to about 20 mol %, from about 3 mol % to about 15 mol %, from about 3 mol % to about 10 mol %, from about 4 mol % to about 20 mol %, from about 4 mol % to about 15 mol %, from about 4 mol % to about 10 mol %, from about 5 mol % to about 20 mol %, from about 5 mol % to about 15 mol %, from about 5 mol % to about 10 mol %, from about 6 mol % to about 20 mol %, from about 6 mol % to about 15 mol %, from about 6 mol % to about 10 mol %, from about 7 mol % to about 20 mol %, from about 7 mol % to about 15 mol %, from about 7 mol % to about 10 mol %, from about 8 mol % to about 20 mol %, from about 8 mol % to about 15 mol %, from about 8 mol % to about 10 mol %, from about 9 mol % to about 20 mol %, from about 9 mol % to about 15 mol %, from about 9 mol % to about 10 mol %.

[1030] In one embodiment, the amount of the quaternary amine compound (e.g., DOTAP) in the lipid composition disclosed herein ranges from about 5 mol % to about 10 mol %.

[1031] In one embodiment, the amount of the quaternary amine compound (e.g., DOTAP) in the lipid composition disclosed herein is about 5 mol %. In one embodiment, the amount of the quaternary amine compound (e.g., DOTAP) in the lipid composition disclosed herein is about 10 mol %.

[1032] In some embodiments, the amount of the quaternary amine compound (e.g., DOTAP) is at least about 0.01, 0.02, 0.03, 0.04, 0.05, 0.06, 0.07, 0.08, 0.09, 0.1, 0.2, 0.3, 0.4, 0.5, 0.6, 0.7, 0.8, 0.9, 1, 1.5, 2, 2.5, 3, 3.5, 4, 4.5, 5, 5.5, 6, 6.5, 7, 7.5, 8, 8.5, 9, 9.5, 10, 10.5, 11, 11.5, 12, 12.5, 13, 13.5, 14, 14.5, 15, 15.5, 16, 16.5, 17, 17.5, 18, 18.5, 19, 19.5 or 20 mol % in the lipid composition disclosed herein.

[1033] In one embodiment, the mole ratio of the compound of formula (I) (e.g., Compounds 18, 25, 26 or 48) to the quaternary amine compound (e.g., DOTA) is about 100:1 to about 2.5:1. In one embodiment, the mole ratio of the compound of formula (I) (e.g., Compounds 18, 25, 26 or 48) to the quaternary amine compound (e.g., DOTAP) is about 90:1, about 80:1, about 70:1, about 60:1, about 50:1, about 40:1, about 30:1, about 20:1, about 15:1, about 10:1, about 9:1, about 8:1, about 7:1, about 6:1, about 5:1, or about 2.5:1. In one embodiment, the mole ratio of the compound of formula (I) (e.g., Compounds 18, 25, 26 or 48) to the quaternary amine compound (e.g., DOTAP) in the lipid composition disclosed herein is about 10:1.

[1034] In some aspects, the lipid composition the pharmaceutical compositions disclosed herein does not comprise a quaternary amine compound. In some aspects, the lipid composition of the pharmaceutical compositions disclosed does not comprise DOTAP.

[1035] (iii) Structural Lipids

[1036] The lipid composition of a pharmaceutical composition disclosed herein can comprise one or more structural lipids. As used herein, the term “structural lipid” refers to sterols and also to lipids containing sterol moieties. In some embodiments, the structural lipid is selected from the group consisting of cholesterol, fecosterol, sitosterol, ergosterol, campesterol, stigmasterol, brassicasterol, tomatidine, tomatine, ursolic acid, alpha-tocopherol, and mixtures thereof. In some embodiments, the structural lipid is cholesterol.

[1037] In one embodiment, the amount of the structural lipid (e.g., an sterol such as cholesterol) in the lipid composition of a pharmaceutical composition disclosed herein ranges from about 20 mol % to about 60 mol %, from about 25 mol % to about 55 mol %, from about 30 mol % to about 50 mol %, or from about 35 mol % to about 45 mol %.

[1038] In one embodiment, the amount of the structural lipid (e.g., an sterol such as cholesterol) in the lipid composition disclosed herein ranges from about 25 mol % to about 30 mol %, from about 30 mol % to about 35 mol %, or from about 35 mol % to about 40 mol %.

[1039] In one embodiment, the amount of the structural lipid (e.g., a sterol such as cholesterol) in the lipid composition disclosed herein is about 23.5 mol %, about 28.5 mol %, about 33.5 mol %, or about 38.5 mol %.

[1040] In some embodiments, the amount of the structural lipid (e.g., an sterol such as cholesterol) in the lipid composition disclosed herein is at least about 20, 21, 22, 23, 24, 25, 26, 27, 28, 29, 30, 31, 32, 33, 34, 35, 36, 37, 38, 39, 40, 41, 42, 43, 44, 45, 46, 47, 48, 49, 50, 51, 52, 53, 54, 55, 56, 57, 58, 59, or 60 mol %.

[1041] In some aspects, the lipid composition component of the pharmaceutical compositions for intratumoral delivery disclosed does not comprise cholesterol.

[1042] (iv) Polyethylene Glycol (PEG)-Lipids

[1043] The lipid composition of a pharmaceutical composition disclosed herein can comprise one or more a polyethylene glycol (PEG) lipid.

[1044] As used herein, the term “PEG-lipid” refers to polyethylene glycol (PEG)-modified lipids. Non-limiting examples of PEG-lipids include PEG-modified phosphatidylethanolamine and phosphatidic acid, PEG-ceramide conjugates (e.g., PEG-CerC14 or PEG-CerC20), PEG-modified dialkylamines and PEG-modified 1,2-diacyloxypropan-3-amines. Such lipids are also referred to as PEGylated lipids. For example, a PEG lipid can be PEG-c-DOMG, PEG-DMG, PEG-DLPE, PEG-DMPE, PEG-DPPC, or a PEG-DSPE lipid.

[1045] In some embodiments, the PEG-lipid includes, but not limited to 1,2-dimyristoyl-sn-glycerol methoxypolyethylene glycol (PEG-DMG), 1,2-distearoyl-sn-glycero-3-phosphoethanolamine-N-[amino(polyethylene glycol)] (PEG-DSPE), PEG-disteryl glycerol (PEG-DSG), PEG-dipalmetoleyl, PEG-dioleyl, PEG-distearyl, PEG-diacylglycamide (PEG-DAG), PEG-dipalmitoyl phosphatidylethanolamine (PEG-DPPE), or PEG-1,2-dimyristyloxlpropyl-3-amine (PEG-c-DMA).

[1046] In one embodiment, the PEG-lipid is selected from the group consisting of a PEG-modified phosphatidylethanolamine, a PEG-modified phosphatidic acid, a PEG-modified ceramide, a PEG-modified dialkylamine, a PEG-modified diacylglycerol, a PEG-modified dialkylglycerol, and mixtures thereof.

[1047] In some embodiments, the lipid moiety of the PEG-lipids includes those having lengths of from about C₁₄ to about C₂₂, preferably from about C₁₄ to about C₁₆. In some embodiments, a PEG moiety, for example an mPEG-NH₂, has a size of about 1000, 2000, 5000, 10,000, 15,000 or 20,000 daltons. In one embodiment, the PEG-lipid is PEG₂ₖ-DMG.

[1048] In one embodiment, the lipid nanoparticles described herein can comprise a PEG lipid which is a non-diffusible PEG. Non-limiting examples of non-diffusible PEGs include PEG-DSG and PEG-DSPE.

[1049] PEG-lipids are known in the art, such as those described in U.S. Pat. No. 8,158,601 and International Publ. No. WO 2015/130584 A2, which are incorporated herein by reference in their entirety.

[1050] In one embodiment, the amount of PEG-lipid in the lipid composition of a pharmaceutical composition disclosed herein ranges from about 0.1 mol % to about 5 mol %, from about 0.5 mol % to about 5 mol %, from about 1 mol % to about 5 mol %, from about 1.5 mol % to about 5 mol %, from about 2 mol % to about 5 mol % mol %, from about 0.1 mol % to about 4 mol %, from about 0.5 mol % to about 4 mol %, from about 1 mol % to about 4 mol %, from about 1.5 mol % to about 4 mol %, from about 2 mol % to about 4 mol %, from about 0.1 mol % to about 3 mol %, from about 0.5 mol % to about 3 mol %, from about 1 mol % to about 3 mol %, from about 1.5 mol % to about 3 mol %, from about 2 mol % to about 3 mol %, from about 0.1 mol % to about 2 mol %, from about 0.5 mol % to about 2 mol %, from about 1 mol % to about 2 mol %, from about 1.5 mol % to about 2 mol %, from about 0.1 mol % to about 1.5 mol %, from about 0.5 mol % to about 1.5 mol %, or from about 1 mol % to about 1.5 mol %.

[1051] In one embodiment, the amount of PEG-lipid in the lipid composition disclosed herein is about 1.5 mol %.

[1052] In one embodiment, the amount of PEG-lipid in the lipid composition disclosed herein is at least about 0.1, 0.2, 0.3, 0.4, 0.5, 0.6, 0.7, 0.8, 0.9, 1, 1.1, 1.2, 1.3, 1.4, 1.5, 1.6, 1.7, 1.8, 1.9, 2, 2.1, 2.2, 2.3, 2.4, 2.5, 2.6, 2.7, 2.8, 2.9, 3, 3.1, 3.2, 3.3, 3.4, 3.5, 3.6, 3.7, 3.8, 3.9, 4, 4.1, 4.2, 4.3, 4.4, 4.5, 4.6, 4.7, 4.8, 4.9, or 5 mol %.

[1053] In some aspects, the lipid composition of the pharmaceutical compositions disclosed herein does not comprise a PEG-lipid.

[1054] In some embodiments, the lipid composition disclosed herein comprises a compound of formula (I) and an asymmetric phospholipid. In some embodiments, the lipid composition comprises compound 18 and MSPC.

[1055] In some embodiments, the lipid composition disclosed herein comprises a compound of formula (I) and a quaternary amine compound. In some embodiments, the lipid composition comprises compound 18 and DOTAP.

[1056] In some embodiments, the lipid composition disclosed herein comprises a compound of formula (I), an asymmetric phospholipid, and a quaternary amine compound. In some embodiments, the lipid composition comprises compound 18, MSPC and DOTAP.

[1057] In one embodiment, the lipid composition comprises about 50 mol % of a compound of formula (I) (e.g. Compounds 18, 25, 26 or 48), about 10 mol % of DSPC or MSPC, about 33.5 mol % of cholesterol, about 1.5 mol % of PEG-DMG, and about 5 mol % of DOTAP.

[1058] In one embodiment, the lipid composition comprises about 50 mol % of a compound of formula (I) (e.g. Compounds 18, 25, 26 or 48), about 10 mol % of DSPC or MSPC, about 28.5 mol % of cholesterol, about 1.5 mol % of PEG-DMG, and about 10 mol % of DOTAP.

[1059] The components of the lipid nanoparticle can be tailored for optimal delivery of the polynucleotides based on the desired outcome. As a non-limiting example, the lipid nanoparticle can comprise 40-60 mol % a compound of formula (I), 8-16 mol % phospholipid, 30-45 mol % cholesterol, 1-5 mol % PEG lipid, and optionally 1-15 mol % quaternary amine compound.

[1060] In some embodiments, the lipid nanoparticle can comprise 45-65 mol % of a compound of formula (I), 5-10 mol % phospholipid, 25-40 mol % cholesterol, 0.5-5 mol % PEG lipid, and optionally 1-15 mol % quaternary amine compound.

[1061] Non-limiting examples of nucleic acid lipid particles are disclosed in U.S. Patent Publication No. 20140121263, herein incorporated by reference in its entirety.

[1062] (v) Other Ionizable Amino Lipids

[1063] The lipid composition of the pharmaceutical composition disclosed herein can comprise one or more ionizable amino lipids in addition to a lipid according to formula (I).

[1064] Ionizable lipids can be selected from the non-limiting group consisting of
[1065] 3-(didodecylamino)-N1,N1,4-tridodecyl-1-piperazineethanamine (KL10),
[1066] N1-[2-(didodecylamino)ethyl]-N1,N4,N4-tridodecyl-1,4-piperazinediethanamine (KL22),
[1067] 14,25-ditridecyl-15,18,21,24-tetraaza-octatriacontane (KL25),
[1068] 1,2-dilinoleyloxy-N,N-dimethylaminopropane (DLin-DMA),
[1069] 2,2-dilinoleyl-4-dimethylaminomethyl-[1,3]-dioxolane (DLin-K-DMA),
[1070] heptatriaconta-6,9,28,31-tetraen-19-yl 4-(dimethylamino)butanoate (DLin-MC3-DMA),
[1071] 2,2-dilinoleyl-4-(2-dimethylaminoethyl)-[1,3]-dioxolane (DLin-KC2-DMA),
[1072] 1,2-dioleyloxy-N,N-dimethylaminopropane (DODMA), (13Z,165Z)—N,N-dimethyl-3-nonydocosa-13-16-dien-1-amine (L608),
[1073] 2-({8-[(33)-cholest-5-en-3-yloxy]octyl}oxy)-N,N-dimethyl-3-[(9Z,12Z)-octadeca-9,12-dien-1-yloxy]propan-1-amine (Octyl-CLinDMA),
[1074] (2R)-2-({8-[(3β)-cholest-5-en-3-yloxy]octyl}oxy)-N,N-dimethyl-3-[(9Z,12Z)-octadeca-9,12-dien-1-yloxy]propan-1-amine (Octyl-CLinDMA (2R)), and
[1075] (2S)-2-({8-[(3β)-cholest-5-en-3-yloxy]octyl}oxy)-N,N-dimethyl-3-[(9Z,12Z)-octadeca-9,12-dien-1-yloxy]propan-1-amine (Octyl-CLinDMA (2S)). In addition to these, an ionizable amino lipid can also be a lipid including a cyclic amine group.

[1076] Ionizable lipids can also be the compounds disclosed in International Publication No. WO 2015/199952 A1, hereby incorporated by reference in its entirety. For example, the ionizable amino lipids include, but not limited to:

[chemical structure]

[chemical structure]

[1077] and any combination thereof.

[1078] (vi) Other Lipid Composition Components

[1079] The lipid composition of a pharmaceutical composition disclosed herein can include one or more components in addition to those described above. For example, the lipid composition can include one or more permeability enhancer molecules, carbohydrates, polymers, surface altering agents (e.g., surfactants), or other components. For example, a permeability enhancer molecule can be a molecule described by U.S. Patent Application Publication No. 2005/0222064. Carbohydrates can include simple sugars (e.g., glucose) and polysaccharides (e.g., glycogen and derivatives and analogs thereof). The lipid composition can include a buffer such as, but not limited to, citrate or phosphate at a pH of 7, salt and/or sugar. Salt and/or sugar can be included in the formulations described herein for isotonicity.

[1080] A polymer can be included in and/or used to encapsulate or partially encapsulate a pharmaceutical composition disclosed herein (e.g., a pharmaceutical composition in lipid nanoparticle form). A polymer can be biodegradable and/or biocompatible. A polymer can be selected from, but is not limited to, polyamines, polyethers, polyamides, polyesters, polycarbamates, polyureas, polycarbonates, polystyrenes, polyimides, polysulfones, polyurethanes, polyacetylenes, polyethylenes, polyethyleneimines, polyisocyanates, polyacrylates, polymethacrylates, polyacrylonitriles, and polyarylates.

[1081] The ratio between the lipid composition and the polynucleotide range can be from about 10:1 to about 60:1 (wt/wt).

[1082] In some embodiments, the ratio between the lipid composition and the polynucleotide can be about 10:1, 11:1, 12:1, 13:1, 14:1, 15:1, 16:1, 17:1, 18:1, 19:1, 20:1, 21:1, 22:1, 23:1, 24:1, 25:1, 26:1, 27:1, 28:1, 29:1, 30:1, 31:1, 32:1, 33:1, 34:1, 35:1, 36:1, 37:1, 38:1, 39:1, 40:1, 41:1, 42:1, 43:1, 44:1, 45:1, 46:1, 47:1, 48:1, 49:1, 50:1, 51:1, 52:1, 53:1, 54:1, 55:1, 56:1, 57:1, 58:1, 59:1 or 60:1 (wt/wt). In some embodiments, the wt/wt ratio of the lipid composition to the polynucleotide encoding a therapeutic agent is about 20:1 or about 15:1.

[1083] In some embodiments, the pharmaceutical composition disclosed herein can contain more than one polypeptides. For example, a pharmaceutical composition disclosed herein can contain two or more polynucleotides (e.g., RNA, e.g., mRNA).

[1084] In one embodiment, the lipid nanoparticles described herein can comprise polynucleotides (e.g., mRNA) in a lipid:polynucleotide weight ratio of 5:1, 10:1, 15:1, 20:1, 25:1, 30:1, 35:1, 40:1, 45:1, 50:1, 55:1, 60:1 or 70:1, or a range or any of these ratios such as, but not limited to, 5:1 to about 10:1, from about 5:1 to about 15:1, from about 5:1 to about 20:1, from about 5:1 to about 25:1, from about 5:1 to about 30:1, from about 5:1 to about 35:1, from about 5:1 to about 40:1, from about 5:1 to about 45:1, from about 5:1 to about 50:1, from about 5:1 to about 55:1, from about 5:1 to about 60:1, from about 5:1 to about 70:1, from about 10:1 to about 15:1, from about 10:1 to about 20:1, from about 10:1 to about 25:1, from about 10:1 to about 30:1, from about 10:1 to about 35:1, from about 10:1 to about 40:1, from about 10:1 to about 45:1, from about 10:1 to about 50:1, from about 10:1 to about 55:1, from about 10:1 to about 60:1, from about 10:1 to about 70:1, from about 15:1 to about 20:1, from about 15:1 to about 25:1, from about 15:1 to about 30:1, from about 15:1 to about 35:1, from about 15:1 to about 40:1, from about 15:1 to about 45:1, from about 15:1 to about 50:1, from about 15:1 to about 55:1, from about 15:1 to about 60:1 or from about 15:1 to about 70:1.

[1085] In one embodiment, the lipid nanoparticles described herein can comprise the polynucleotide in a concentration from approximately 0.1 mg/ml to 2 mg/ml such as, but not limited to, 0.1 mg/ml, 0.2 mg/ml, 0.3 mg/ml, 0.4 mg/ml, 0.5 mg/ml, 0.6 mg/ml, 0.7 mg/ml, 0.8 mg/ml, 0.9 mg/ml, 1.0 mg/ml, 1.1 mg/ml, 1.2 mg/ml, 1.3 mg/ml, 1.4 mg/ml, 1.5 mg/ml, 1.6 mg/ml, 1.7 mg/ml, 1.8 mg/ml, 1.9 mg/ml, 2.0 mg/ml or greater than 2.0 mg/ml.

[1086] In one embodiment, formulations comprising the polynucleotides and lipid nanoparticles described herein can comprise 0.15 mg/ml to 2 mg/ml of the polynucleotide described herein (e.g., mRNA). In some embodiments, the formulation can further comprise 10 mM of citrate buffer and the formulation can additionally comprise up to 10% w/w of sucrose (e.g., at least 1% w/w, at least 2% w/w/, at least 3% w/w, at least 4% w/w, at least 5% w/w, at least 6% w/w, at least 7% w/w, at least 8% w/w, at least 9% w/w or 10% w/w).

[1087] (vii) Nanoparticle Compositions

[1088] In some embodiments, the pharmaceutical compositions disclosed herein are formulated as lipid nanoparticles (LNP). Accordingly, the present disclosure also provides nanoparticle compositions comprising (i) a lipid composition comprising a compound of formula (I) as described herein, and (ii) a polynucleotide encoding a polypeptide (e.g., SteA-BH3 polypeptide). In such nanoparticle composition, the lipid composition disclosed herein can encapsulate the polynucleotide encoding a polypeptide (e.g., SteA-BH3 polypeptide).

[1089] Nanoparticle compositions are typically sized on the order of micrometers or smaller and can include a lipid bilayer. Nanoparticle compositions encompass lipid nanoparticles (LNPs), liposomes (e.g., lipid vesicles), and lipoplexes. For example, a nanoparticle composition can be a liposome having a lipid bilayer with a diameter of 500 nm or less.

[1090] Nanoparticle compositions include, for example, lipid nanoparticles (LNPs), liposomes, and lipoplexes. In some embodiments, nanoparticle compositions are vesicles including one or more lipid bilayers. In certain embodiments, a nanoparticle composition includes two or more concentric bilayers separated by aqueous compartments. Lipid bilayers can be functionalized and/or crosslinked to one another. Lipid bilayers can include one or more ligands, proteins, or channels.

[1091] Nanoparticle compositions of the present disclosure comprise at least one compound according to formula (I). For example, the nanoparticle composition can include one or more of Compounds 1-147. Nanoparticle compositions can also include a variety of other components. For example, the nanoparticle composition can include one or more other lipids in addition to a lipid according to formula (I) or (II), for example (i) at least one phospholipid, (ii) at least one quaternary amine compound, (iii) at least one structural lipid, (iv) at least one PEG-lipid, or (v) any combination thereof.

[1092] In some embodiments, the nanoparticle composition comprises a compound of formula (I), (e.g., Compounds 18, 25, 26 or 48). In some embodiments, the nanoparticle composition comprises a compound of formula (I) (e.g., Compounds 18, 25, 26 or 48) and a phospholipid (e.g., DSPC or MSPC). In some embodiments, the nanoparticle composition comprises a compound of formula (I) (e.g., Compounds 18, 25, 26 or 48), a phospholipid (e.g., DSPC or MSPC), and a quaternary amine compound (e.g., DOTAP). In some embodiments, the nanoparticle composition comprises a compound of formula (I) (e.g., Compounds 18, 25, 26 or 48), and a quaternary amine compound (e.g., DOTAP).

[1093] In some embodiments, the nanoparticle composition comprises a lipid composition consisting or consisting essentially of compound of formula (I) (e.g., Compounds 18, 25, 26 or 48). In some embodiments, the nanoparticle composition comprises a lipid composition consisting or consisting essentially of a compound of formula (I) (e.g., Compounds 18, 25, 26 or 48) and a phospholipid (e.g., DSPC or MSPC). In some embodiments, the nanoparticle composition comprises a lipid composition consisting or consisting essentially of a compound of formula (I) (e.g., Compounds 18, 25, 26 or 48), a phospholipid (e.g., DSPC or MSPC), and a quaternary amine compound (e.g., DOTAP). In some embodiments, the nanoparticle composition comprises a lipid composition consisting or consisting essentially of a compound of formula (I) (e.g., Compounds 18, 25, 26 or 48), and a quaternary amine compound (e.g., DOTAP).

[1094] Nanoparticle compositions can be characterized by a variety of methods. For example, microscopy (e.g., transmission electron microscopy or scanning electron microscopy) can be used to examine the morphology and size distribution of a nanoparticle composition. Dynamic light scattering or potentiometry (e.g., potentiometric titrations) can be used to measure zeta potentials. Dynamic light scattering can also be utilized to determine particle sizes. Instruments such as the Zetasizer Nano ZS (Malvern Instruments Ltd, Malvern, Worcestershire, UK) can also be used to measure multiple characteristics of a nanoparticle composition, such as particle size, polydispersity index, and zeta potential.

[1095] The size of the nanoparticles can help counter biological reactions such as, but not limited to, inflammation, or can increase the biological effect of the polynucleotide.

[1096] As used herein, “size” or “mean size” in the context of nanoparticle compositions refers to the mean diameter of a nanoparticle composition.

[1097] In one embodiment, the polynucleotide encoding a polypeptide (e.g., SteA-BH3 polypeptide) is formulated in lipid nanoparticles having a diameter from about 10 to about 100 nm such as, but not limited to, about 10 to about 20 nm, about 10 to about 30 nm, about 10 to about 40 nm, about 10 to about 50 nm, about 10 to about 60 nm, about 10 to about 70 nm, about 10 to about 80 nm, about 10 to about 90 nm, about 20 to about 30 nm, about 20 to about 40 nm, about 20 to about 50 nm, about 20 to about 60 nm, about 20 to about 70 nm, about 20 to about 80 nm, about 20 to about 90 nm, about 20 to about 100 nm, about 30 to about 40 nm, about 30 to about 50 nm, about 30 to about 60 nm, about 30 to about 70 nm, about 30 to about 80 nm, about 30 to about 90 nm, about 30 to about 100 nm, about 40 to about 50 nm, about 40 to about 60 nm, about 40 to about 70 nm, about 40 to about 80 nm, about 40 to about 90 nm, about 40 to about 100 nm, about 50 to about 60 nm, about 50 to about 70 nm, about 50 to about 80 nm, about 50 to about 90 nm, about 50 to about 100 nm, about 60 to about 70 nm, about 60 to about 80 nm, about 60 to about 90 nm, about 60 to about 100 nm, about 70 to about 80 nm, about 70 to about 90 nm, about 70 to about 100 nm, about 80 to about 90 nm, about 80 to about 100 nm and/or about 90 to about 100 nm.

[1098] In one embodiment, the nanoparticles have a diameter from about 10 to 500 nm. In one embodiment, the nanoparticle has a diameter greater than 100 nm, greater than 150 nm, greater than 200 nm, greater than 250 nm, greater than 300 nm, greater than 350 nm, greater than 400 nm, greater than 450 nm, greater than 500 nm, greater than 550 nm, greater than 600 nm, greater than 650 nm, greater than 700 nm, greater than 750 nm, greater than 800 nm, greater than 850 nm, greater than 900 nm, greater than 950 nm or greater than 1000 nm.

[1099] In some embodiments, the largest dimension of a nanoparticle composition is 1 μm or shorter (e.g., 1 μm, 900 nm, 800 nm, 700 nm, 600 nm, 500 nm, 400 nm, 300 nm, 200 nm, 175 nm, 150 nm, 125 nm, 100 nm, 75 nm, 50 nm, or shorter).

[1100] A nanoparticle composition can be relatively homogenous. A polydispersity index can be used to indicate the homogeneity of a nanoparticle composition, e.g., the particle size distribution of the nanoparticle composition. A small (e.g., less than 0.3) polydispersity index generally indicates a narrow particle size distribution. A nanoparticle composition can have a polydispersity index from about 0 to about 0.25, such as 0.01, 0.02, 0.03, 0.04, 0.05, 0.06, 0.07, 0.08, 0.09, 0.10, 0.11, 0.12, 0.13, 0.14, 0.15, 0.16, 0.17, 0.18, 0.19, 0.20, 0.21, 0.22, 0.23, 0.24, or 0.25. In some embodiments, the polydispersity index of a nanoparticle composition disclosed herein can be from about 0.10 to about 0.20.

[1101] The zeta potential of a nanoparticle composition can be used to indicate the electrokinetic potential of the composition. For example, the zeta potential can describe the surface charge of a nanoparticle composition. Nanoparticle compositions with relatively low charges, positive or negative, are generally desirable, as more highly charged species can interact undesirably with cells, tissues, and other elements in the body. In some embodiments, the zeta potential of a nanoparticle composition disclosed herein can be from about −10 mV to about +20 mV, from about −10 mV to about +15 mV, from about 10 mV to about +10 mV, from about −10 mV to about +5 mV, from about −10 mV to about 0 mV, from about −10 mV to about −5 mV, from about −5 mV to about +20 mV, from about −5 mV to about +15 mV, from about −5 mV to about +10 mV, from about −5 mV to about +5 mV, from about −5 mV to about 0 mV, from about 0 mV to about +20 mV, from about 0 mV to about +15 mV, from about 0 mV to about +10 mV, from about 0 mV to about +5 mV, from about +5 mV to about +20 mV, from about +5 mV to about +15 mV, or from about +5 mV to about +10 mV.

[1102] In some embodiments, the zeta potential of the lipid nanoparticles can be from about 0 mV to about 100 mV, from about 0 mV to about 90 mV, from about 0 mV to about 80 mV, from about 0 mV to about 70 mV, from about 0 mV to about 60 mV, from about 0 mV to about 50 mV, from about 0 mV to about 40 mV, from about 0 mV to about 30 mV, from about 0 mV to about 20 mV, from about 0 mV to about 10 mV, from about 10 mV to about 100 mV, from about 10 mV to about 90 mV, from about 10 mV to about 80 mV, from about 10 mV to about 70 mV, from about 10 mV to about 60 mV, from about 10 mV to about 50 mV, from about 10 mV to about 40 mV, from about 10 mV to about 30 mV, from about 10 mV to about 20 mV, from about 20 mV to about 100 mV, from about 20 mV to about 90 mV, from about 20 mV to about 80 mV, from about 20 mV to about 70 mV, from about 20 mV to about 60 mV, from about 20 mV to about 50 mV, from about 20 mV to about 40 mV, from about 20 mV to about 30 mV, from about 30 mV to about 100 mV, from about 30 mV to about 90 mV, from about 30 mV to about 80 mV, from about 30 mV to about 70 mV, from about 30 mV to about 60 mV, from about 30 mV to about 50 mV, from about 30 mV to about 40 mV, from about 40 mV to about 100 mV, from about 40 mV to about 90 mV, from about 40 mV to about 80 mV, from about 40 mV to about 70 mV, from about 40 mV to about 60 mV, and from about 40 mV to about 50 mV. In some embodiments, the zeta potential of the lipid nanoparticles can be from about 10 mV to about 50 mV, from about 15 mV to about 45 mV, from about 20 mV to about 40 mV, and from about 25 mV to about 35 mV. In some embodiments, the zeta potential of the lipid nanoparticles can be about 10 mV, about 20 mV, about 30 mV, about 40 mV, about 50 mV, about 60 mV, about 70 mV, about 80 mV, about 90 mV, and about 100 mV.

[1103] The term “encapsulation efficiency” of a polynucleotide describes the amount of the polynucleotide that is encapsulated by or otherwise associated with a nanoparticle composition after preparation, relative to the initial amount provided. As used herein, “encapsulation” can refer to complete, substantial, or partial enclosure, confinement, surrounding, or encasement.

[1104] Encapsulation efficiency is desirably high (e.g., close to 100%). The encapsulation efficiency can be measured, for example, by comparing the amount of the polynucleotide in a solution containing the nanoparticle composition before and after breaking up the nanoparticle composition with one or more organic solvents or detergents.

[1105] Fluorescence can be used to measure the amount of free polynucleotide in a solution. For the nanoparticle compositions described herein, the encapsulation efficiency of a polynucleotide can be at least 50%, for example 50%, 55%, 60%, 65%, 70%, 75%, 80%, 85%, 90%, 91%, 92%, 93%, 94%, 95%, 96%, 97%, 98%, 99%, or 100%. In some embodiments, the encapsulation efficiency can be at least 80%. In certain embodiments, the encapsulation efficiency can be at least 90%.

[1106] The amount of a polynucleotide present in a pharmaceutical composition disclosed herein can depend on multiple factors such as the size of the polynucleotide, desired target and/or application, or other properties of the nanoparticle composition as well as on the properties of the polynucleotide.

[1107] For example, the amount of an mRNA useful in a nanoparticle composition can depend on the size (expressed as length, or molecular mass), sequence, and other characteristics of the mRNA. The relative amounts of a polynucleotide in a nanoparticle composition can also vary.

[1108] The relative amounts of the lipid composition and the polynucleotide present in a lipid nanoparticle composition of the present disclosure can be optimized according to considerations of efficacy and tolerability. For compositions including an mRNA as a polynucleotide, the N:P ratio can serve as a useful metric.

[1109] As the N:P ratio of a nanoparticle composition controls both expression and tolerability, nanoparticle compositions with low N:P ratios and strong expression are desirable. N:P ratios vary according to the ratio of lipids to RNA in a nanoparticle composition.

[1110] In general, a lower N:P ratio is preferred. The one or more RNA, lipids, and amounts thereof can be selected to provide an N:P ratio from about 2:1 to about 30:1, such as 2:1,3:1, 4:1, 5:1, 6:1, 7:1, 8:1, 9:1, 10:1, 12:1, 14:1, 16:1, 18:1, 20:1, 22:1, 24:1, 26:1, 28:1, or 30:1. In certain embodiments, the N:P ratio can be from about 2:1 to about 8:1. In other embodiments, the N:P ratio is from about 5:1 to about 8:1. In certain embodiments, the N:P ratio is between 5:1 and 6:1. In one specific aspect, the N:P ratio is about is about 5.67:1.

[1111] In addition to providing nanoparticle compositions, the present disclosure also provides methods of producing lipid nanoparticles comprising encapsulating a polynucleotide. Such method comprises using any of the pharmaceutical compositions disclosed herein and producing lipid nanoparticles in accordance with methods of production of lipid nanoparticles known in the art. See, e.g., Wang et al. (2015) “Delivery of oligonucleotides with lipid nanoparticles” Adv. Drug Deliv. Rev. 87:68-80; Silva et al. (2015) “Delivery Systems for Biopharmaceuticals. Part I: Nanoparticles and Microparticles” Curr. Pharm. Technol. 16: 940-954; Naseri et al. (2015) “Solid Lipid Nanoparticles and Nanostructured Lipid Carriers: Structure, Preparation and Application” Adv. Pharm. Bull. 5:305-13; Silva et al. (2015) “Lipid nanoparticles for the delivery of biopharmaceuticals” Curr. Pharm. Biotechnol. 16:291-302, and references cited therein.

### Pharmaceutical Compositions

[1112] The present invention includes pharmaceutical compositions comprising an mRNA or a nanoparticle (e.g., a lipid nanoparticle) described herein, in combination with one or more pharmaceutically acceptable excipient, carrier or diluent. In some embodiments, a pharmaceutical composition of the invention includes an mRNA encoding one or more BH3 domains. In certain embodiments, a pharmaceutical composition of the invention includes an mRNA encoding a Bcl-2-like polypeptide or fragment or variant thereof. In certain embodiments, a pharmaceutical composition includes both a first mRNA encoding one or more BH3 domains, and a second mRNA encoding a Bcl-2-like polypeptide or fragment or variant thereof. In particular embodiments, the mRNA is present in a nanoparticle, e.g., a lipid nanoparticle. In particular embodiments, the mRNA or nanoparticle is present in a pharmaceutical composition. In various embodiments, the one or more mRNA present in the pharmaceutical composition is encapsulated in a nanoparticle, e.g., a lipid nanoparticle. In particular embodiments, the molar ratio of the first mRNA to the second mRNA is about 1:50, about 1:25, about 1:10, about 1:5, about 1:4, about 1:3, about 1:2, about 1:1, about 2:1, about 3:1, about 4:1, or about 5:1, about 10:1, about 25:1 or about 50:1. In particular embodiments, the molar ratio of the first mRNA to the second mRNA is greater than 1:1.

[1113] Pharmaceutical compositions may optionally include one or more additional active substances, for example, therapeutically and/or prophylactically active substances. Pharmaceutical compositions of the present invention may be sterile and/or pyrogen-free. General considerations in the formulation and/or manufacture of pharmaceutical agents may be found, for example, in Remington: The Science and Practice of Pharmacy 21^{st} ed., Lippincott Williams & Wilkins, 2005 (incorporated herein by reference in its entirety). In particular embodiments, a pharmaceutical composition comprises an mRNA and a lipid nanoparticle, or complexes thereof. In some embodiments, the pharmaceutical compositions or formulations described herein may contain at least one mRNA encoding one or more intracellular binding domains as described herein. In particular embodiments, the pharmaceutical compositions or formulations described herein may contain at least one mRNA encoding one or more BH3 domains and/or at least one mRNA encoding a BH3-trap polypeptide (e.g., a Bcl-2-like polypeptide).

[1114] Formulations of the pharmaceutical compositions described herein may be prepared by any method known or hereafter developed in the art of pharmacology. In general, such preparatory methods include the step of bringing the active ingredient into association with an excipient and/or one or more other accessory ingredients, and then, if necessary and/or desirable, dividing, shaping and/or packaging the product into a desired single- or multi-dose unit.

[1115] Relative amounts of the active ingredient, the pharmaceutically acceptable excipient, and/or any additional ingredients in a pharmaceutical composition in accordance with the invention will vary, depending upon the identity, size, and/or condition of the subject treated and further depending upon the route by which the composition is to be administered. By way of example, the composition may include between 0.1% and 100%, e.g., between 0.5% and 70%, between 1% and 30%, between 5% and 80%, or at least 80% (w/w) active ingredient. In some embodiments, the active agent is an mRNA encoding one or more intracellular binding domains described herein. In some embodiments, the active agent is an mRNA encoding one or more BH3 domains.

[1116] The mRNAs of the invention (e.g., mRNA encoding one or more BH3 domains and/or a BH3-trap polypeptide) can be formulated using one or more excipients to: (1) increase stability; (2) increase cell transfection; (3) permit the sustained or delayed release (e.g., from a depot formulation of the mRNA); (4) alter the biodistribution (e.g., target the mRNA to specific tissues or cell types); (5) increase the translation of a polypeptide encoded by the mRNA in vivo; and/or (6) alter the release profile of a polypeptide encoded by the mRNA in vivo. In addition to traditional excipients such as any and all solvents, dispersion media, diluents, or other liquid vehicles, dispersion or suspension aids, surface active agents, isotonic agents, thickening or emulsifying agents, preservatives, excipients of the present invention can include, without limitation, lipidoids, liposomes, lipid nanoparticles (e.g., liposomes and micelles), polymers, lipoplexes, core-shell nanoparticles, peptides, proteins, carbohydrates, cells transfected with mRNAs (e.g., for transplantation into a subject), hyaluronidase, nanoparticle mimics and combinations thereof. Accordingly, the formulations of the invention can include one or more excipients, each in an amount that together increases the stability of the mRNA, increases cell transfection by the mRNA, increases the expression of a polypeptide encoded by the mRNA, and/or alters the release profile of a mRNA-encoded polypeptide. Further, the mRNAs of the present invention may be formulated using self-assembled nucleic acid nanoparticles.

[1117] Various excipients for formulating pharmaceutical compositions and techniques for preparing the composition are known in the art (see Remington: The Science and Practice of Pharmacy, 21st Edition, A. R. Gennaro, Lippincott, Williams & Wilkins, Baltimore, Md., 2006; incorporated herein by reference in its entirety). The use of a conventional excipient medium may be contemplated within the scope of the present disclosure, except insofar as any conventional excipient medium may be incompatible with a substance or its derivatives, such as by producing any undesirable biological effect or otherwise interacting in a deleterious manner with any other component(s) of the pharmaceutical composition. Excipients may include, for example: antiadherents, antioxidants, binders, coatings, compression aids, disintegrants, dyes (colors), emollients, emulsifiers, fillers (diluents), film formers or coatings, glidants (flow enhancers), lubricants, preservatives, printing inks, sorbents, suspensing or dispersing agents, sweeteners, and waters of hydration. Exemplary excipients include, but are not limited to: butylated hydroxytoluene (BHT), calcium carbonate, calcium phosphate (dibasic), calcium stearate, croscarmellose, crosslinked polyvinyl pyrrolidone, citric acid, crospovidone, cysteine, ethylcellulose, gelatin, hydroxypropyl cellulose, hydroxypropyl methylcellulose, lactose, magnesium stearate, maltitol, mannitol, methionine, methylcellulose, methyl paraben, microcrystalline cellulose, polyethylene glycol, polyvinyl pyrrolidone, povidone, pregelatinized starch, propyl paraben, retinyl palmitate, shellac, silicon dioxide, sodium carboxymethyl cellulose, sodium citrate, sodium starch glycolate, sorbitol, starch (corn), stearic acid, sucrose, talc, titanium dioxide, vitamin A, vitamin E, vitamin C, and xylitol.

[1118] In some embodiments, the formulations described herein may include at least one pharmaceutically acceptable salt. Examples of pharmaceutically acceptable salts that may be included in a formulation of the invention include, but are not limited to, acid addition salts, alkali or alkaline earth metal salts, mineral or organic acid salts of basic residues such as amines; alkali or organic salts of acidic residues such as carboxylic acids; and the like. Representative acid addition salts include acetate, acetic acid, adipate, alginate, ascorbate, aspartate, benzenesulfonate, benzene sulfonic acid, benzoate, bisulfate, borate, butyrate, camphorate, camphorsulfonate, citrate, cyclopentanepropionate, digluconate, dodecylsulfate, ethanesulfonate, fumarate, glucoheptonate, glycerophosphate, hemisulfate, heptonate, hexanoate, hydrobromide, hydrochloride, hydroiodide, 2-hydroxy-ethanesulfonate, lactobionate, lactate, laurate, lauryl sulfate, malate, maleate, malonate, methanesulfonate, 2-naphthalenesulfonate, nicotinate, nitrate, oleate, oxalate, palmitate, pamoate, pectinate, persulfate, 3-phenylpropionate, phosphate, picrate, pivalate, propionate, stearate, succinate, sulfate, tartrate, thiocyanate, toluenesulfonate, undecanoate, valerate salts, and the like. Representative alkali or alkaline earth metal salts include sodium, lithium, potassium, calcium, magnesium, and the like, as well as nontoxic ammonium, quaternary ammonium, and amine cations, including, but not limited to ammonium, tetramethylammonium, tetraethylammonium, methylamine, dimethylamine, trimethylamine, triethylamine, ethylamine, and the like.

[1119] In some embodiments, the formulations described herein may contain at least one type of polynucleotide. As a non-limiting example, the formulations may contain 1, 2, 3, 4, 5 or more than 5 mRNAs described herein. In some embodiments, the formulations described herein may contain at least one mRNA encoding one or more BH3 domains and/or a BH3-trap polypeptide (e.g., a Bcl-2-like polypeptide or variant or fragment thereof), and at least one nucleic acid sequence such as, but not limited to, an siRNA, an shRNA, a snoRNA, and an miRNA.

[1120] Liquid dosage forms for e.g., parenteral administration include, but are not limited to, pharmaceutically acceptable emulsions, microemulsions, nanoemulsions, solutions, suspensions, syrups, and/or elixirs. In addition to active ingredients, liquid dosage forms may comprise inert diluents commonly used in the art such as, for example, water or other solvents, solubilizing agents and emulsifiers such as ethyl alcohol, isopropyl alcohol, ethyl carbonate, ethyl acetate, benzyl alcohol, benzyl benzoate, propylene glycol, 1,3-butylene glycol, dimethylformamide, oils (in particular, cottonseed, groundnut, corn, germ, olive, castor, and sesame oils), glycerol, tetrahydrofurfuryl alcohol, polyethylene glycols and fatty acid esters of sorbitan, and mixtures thereof. Besides inert diluents, oral compositions can include adjuvants such as wetting agents, emulsifying and/or suspending agents. In certain embodiments for parenteral administration, compositions are mixed with solubilizing agents such as CREMAPHOR®, alcohols, oils, modified oils, glycols, polysorbates, cyclodextrins, polymers, and/or combinations thereof.

[1121] Injectable preparations, for example, sterile injectable aqueous or oleaginous suspensions may be formulated according to the known art using suitable dispersing agents, wetting agents, and/or suspending agents. Sterile injectable preparations may be sterile injectable solutions, suspensions, and/or emulsions in nontoxic parenterally acceptable diluents and/or solvents, for example, as a solution in 1,3-butanediol. Among the acceptable vehicles and solvents that may be employed are water, Ringer's solution, U.S.P., and isotonic sodium chloride solution. Sterile, fixed oils are conventionally employed as a solvent or suspending medium. For this purpose any bland fixed oil can be employed including synthetic mono- or diglycerides. Fatty acids such as oleic acid can be used in the preparation of injectables. Injectable formulations can be sterilized, for example, by filtration through a bacterial-retaining filter, and/or by incorporating sterilizing agents in the form of sterile solid compositions which can be dissolved or dispersed in sterile water or other sterile injectable medium prior to use.

[1122] In some embodiments, pharmaceutical compositions including at least one mRNA described herein are administered to mammals (e.g., humans). Although the descriptions of pharmaceutical compositions provided herein are principally directed to pharmaceutical compositions which are suitable for administration to humans, it will be understood by the skilled artisan that such compositions are generally suitable for administration to any other animal, e.g., to a non-human mammal. Modification of pharmaceutical compositions suitable for administration to humans in order to render the compositions suitable for administration to various animals is well understood, and the ordinarily skilled veterinary pharmacologist can design and/or perform such modification with merely ordinary, if any, experimentation. Subjects to which administration of the pharmaceutical compositions is contemplated include, but are not limited to, humans and/or other primates; mammals, including commercially relevant mammals such as cattle, pigs, horses, sheep, cats, dogs, mice, and/or rats; and/or birds, including commercially relevant birds such as poultry, chickens, ducks, geese, and/or turkeys. In particular embodiments, a subject is provided with two or more mRNAs described herein, e.g., a first mRNA encoding one or more BH3 domains and a second mRNA encoding a Bcl-2-like polypeptide. In particular embodiments, the first and second mRNAs are provided to the subject at the same time or at different times, e.g., sequentially. In particular embodiments, the first and second mRNAs are provided to the subject in the same pharmaceutical composition or formulation, e.g., to facilitate uptake of both mRNAs by the same cells.

[1123] The present invention also includes kits comprising a container comprising a first mRNA encoding one or more BH3 domains and a second mRNA encoding a Bcl-2-like polypeptide or variant or fragment thereof, e.g., a prosurvival Bcl-2-like polypeptide. In other embodiments, the kit comprises a first container comprising the mRNA encoding one or more BH3 domains and a second container comprising the mRNA encoding the Bcl-2-like polypeptide or variant or fragment thereof. In particular embodiments, the mRNAs are present in the same or different nanoparticles and/or pharmaceutical compositions. In particular embodiments, the mRNAs are lyophilized, dried, or freeze-dried.

### Therapeutic Methods

[1124] The invention also provides methods of treating or preventing a cancer in a subject in need thereof that involve providing or administering an mRNA encoding one or more intracellular binding domains as described herein to the subject. In a related embodiment, the subject is provided with or administered a nanoparticle (e.g., a lipid nanoparticle) comprising the mRNA. In further related embodiments, the subject is provided with or administered a pharmaceutical composition of the invention to the subject. In particular embodiments, the pharmaceutical composition comprises an mRNA encoding a BH3 domain(s) as described herein, or it comprises a nanoparticle comprising the mRNA. In particular embodiments, the mRNA is present in a nanoparticle, e.g., a lipid nanoparticle. In particular embodiments, the mRNA or nanoparticle is present in a pharmaceutical composition. In certain embodiments, the subject in need thereof has been diagnosed with a cancer, or is considered to be at risk of developing a cancer. In some embodiments, the cancer is liver cancer or colorectal cancer. In particular embodiments, the liver cancer is hepatocellular carcinoma. In some embodiments, the colorectal cancer is a primary tumor or a metastasis. In some embodiments, the cancer is a hematopoetic cancer. In some embodiments, the cancer is an acute myeloid leukemia, a chronic myeloid leukemia, a chronic myelomonocytic leukemia, a myelodystrophic syndrome (including refractory anemias and refractory cytopenias) or a myeloproliferative neoplasm or disease (including polycythemia vera, essential thrombocytosis and primary myelofibrosis).

[1125] In other embodiments, the cancer is a blood-based cancer or a hematopoetic cancer. Selectivity for a particular cancer type can be achieved through the combination of use of an appropriate LNP formulation (e.g., targeting specific cell types) in combination with appropriate regulatory site(s) (e.g., microRNAs) engineered into the mRNA constructs.

[1126] In some embodiments, the mRNA, nanoparticle, or pharmaceutical composition is administered to the patient parenterally. In particular embodiments, the subject is a mammal, e.g., a human. In particular embodiments, the pharmaceutical composition comprises an mRNA encoding one or more BH3 domains, as described herein. In various embodiments, the subject is provided with an effective amount of the mRNA.

[1127] The invention further provides methods of treating or preventing cancer in a subject in need thereof, comprising providing the subject with an effective amount of an mRNA described herein, e.g., an mRNA encoding one or more BH3 domains, wherein the mRNA further comprises a regulatory element that enhances expression of the BH3 domain(s) in cancer cells as compared to normal cells. In particular embodiments, the regulatory element is a binding site for a microRNA that has greater expression in normal cells than cancer cells (e.g., a miR-122 binding site), wherein binding of the microRNA to the binding site inhibits expression of the intracellular binding domain(s) (e.g., BH3). In particular embodiments, the mRNA is present in a nanoparticle, e.g., a lipid nanoparticle. In particular embodiments, the mRNA or nanoparticle is present in a pharmaceutical composition. The nanoparticle or the isolated mRNA may be taken up and translated in the subject's cells to produce the one or more intracellular binding domains. In particular embodiments, expression of the intracellular binding domain(s) is greater in cancer cells than normal cells, resulting in greater apoptosis of cancer cells than normal cells.

[1128] In particular embodiments, the subject is provided or administered both a first mRNA encoding one or more BH3 domains and a second mRNA encoding a Bcl-2-like polypeptide or variant or fragment thereof. In particular embodiments, the first mRNA comprises a regulatory element to enhance expression of the BH3 domain(s) in cancer cells as compared to normal cells and/or the second mRNA comprises a regulatory element to enhance expression in normal cells as compared to cancer cells. In particular embodiments, the first mRNA comprises a miR-122 binding sequence. In particular embodiments, the second mRNA comprises a miR-21 binding sequence. In certain embodiments, the first mRNA and second mRNA are both present in the same nanoparticle or pharmaceutical composition. In certain embodiments, the first mRNA and the second mRNA are present in different nanoparticles or pharmaceutical compositions. In particular embodiments, the molar ratio of the first mRNA to the second mRNA is about 1:50, about 1:25, about 1:10, about 1:5, about 1:4, about 1:3, about 1:2, about 1:1, about 2:1, about 3:1, about 4:1, or about 5:1, about 10:1, about 25:1 or about 50:1. In particular embodiments, the molar ration of the first mRNA to the second mRNA is greater than 1:1.

[1129] Thus, in some embodiments, the present invention includes a method of treating or preventing cancer in a subject in need thereof, comprising providing to the subject a first mRNA described herein, e.g., an mRNA encoding one or more BH3 domains, optionally wherein the mRNA comprises a regulatory element that decreases expression of the fusion polypeptide in normal cells as compared to cancer cells, and a second mRNA described herein, e.g., an mRNA encoding a prosurvival Bcl-2-like polypeptide or variant or fragment thereof, optionally wherein the second mRNA comprises a regulatory element that decreases expression of the Bcl-2-like polypeptide or variant or fragment thereof in cancer cells as compared to normal cells. In particular embodiments, the regulatory element present in the first mRNA is a binding site for a microRNA that has greater expression in normal cells than cancer cells (e.g., a miR-122 binding site). In particular embodiments, the regulatory element present in the second mRNA is a binding site for a microRNA that has greater expression in cancer cells than normal cells (e.g., a miR-21 binding site), wherein binding of the microRNA to the binding site inhibits expression of the Bcl-2-like polypeptide or variant thereof. In particular embodiments, the subject is provided with a pharmaceutical composition or nanoparticle comprising the first RNA and/or the second RNA. The mRNAs may be taken up and translated in the subject's cells to produce the BH3 domain(s) and the Bcl-2-like polypeptide or variant or fragment thereof. Expression of the one or more BH3 domains is greater in cancer cells than normal cells, resulting in greater apoptosis of cancer cells than normal cells. Expression of the Bcl-2-like polypeptide inhibits apoptosis induced by the fusion polypeptide. Since the Bcl-2-like polypeptide is expressed in higher amounts in normal cells, it inhibits a greater amount of apoptosis induced by the BH3 domain(s) in normal cells as compared to cancer cells.

[1130] In certain embodiments, the present invention includes a method of treating or preventing cancer in a subject in need thereof, comprising providing to the subject a first mRNA described herein, e.g., an mRNA encoding one or more BH3 domains, in combination with a therapeutic agent, such as a chemotherapeutic drug or other anti-cancer agent. In certain embodiments, a second mRNA as described herein, e.g., an mRNA encoding a prosurvival Bcl-2-like polypeptide or variant or fragment thereof, is also included in the treatment regimen, together with the first mRNA and the therapeutic agent. Optionally, the second mRNA comprises a regulatory element that decreases expression of the Bcl-2-like polypeptide or variant or fragment thereof in cancer cells as compared to normal cells. Suitable therapeutic agents for use in combination therapy include small molecule chemotherapeutic agents, including protein tyrosine kinase inhibitors, as well as biological anti-cancer agents, such as anti-cancer antibodies. A preferred therapeutic agent for combination therapy is sorafenib. Other suitable therapeutic agents for use in combination therapy are described further below.

[1131] A pharmaceutical composition including one or more mRNAs of the invention may be administered to a subject by any suitable route. In some embodiments, compositions of the invention are administered by one or more of a variety of routes, including parenteral (e.g., subcutaneous, intracutaneous, intravenous, intraperitoneal, intramuscular, intraarticular, intraarterial, intrasynovial, intrasternal, intrathecal, intralesional, or intracranial injection, as well as any suitable infusion technique), oral, trans- or intra-dermal, interdermal, rectal, intravaginal, topical (e.g. by powders, ointments, creams, gels, lotions, and/or drops), mucosal, nasal, buccal, enteral, vitreal, intratumoral, sublingual, intranasal; by intratracheal instillation, bronchial instillation, and/or inhalation; as an oral spray and/or powder, nasal spray, and/or aerosol, and/or through a portal vein catheter. In some embodiments, a composition may be administered intravenously, intramuscularly, intradermally, intra-arterially, intratumorally, subcutaneously, or by inhalation. However, the present disclosure encompasses the delivery of compositions of the invention by any appropriate route taking into consideration likely advances in the sciences of drug delivery. In general, the most appropriate route of administration will depend upon a variety of factors including the nature of the pharmaceutical composition including one or more mRNAs (e.g., its stability in various bodily environments such as the bloodstream and gastrointestinal tract), and the condition of the patient (e.g., whether the patient is able to tolerate particular routes of administration).

[1132] In certain embodiments, compositions of the invention may be administered at dosage levels sufficient to deliver from about 0.0001 mg/kg to about 10 mg/kg, from about 0.001 mg/kg to about 10 mg/kg, from about 0.005 mg/kg to about 10 mg/kg, from about 0.01 mg/kg to about 10 mg/kg, from about 0.1 mg/kg to about 10 mg/kg, from about 1 mg/kg to about 10 mg/kg, from about 2 mg/kg to about 10 mg/kg, from about 5 mg/kg to about 10 mg/kg, from about 0.0001 mg/kg to about 5 mg/kg, from about 0.001 mg/kg to about 5 mg/kg, from about 0.005 mg/kg to about 5 mg/kg, from about 0.01 mg/kg to about 5 mg/kg, from about 0.1 mg/kg to about 10 mg/kg, from about 1 mg/kg to about 5 mg/kg, from about 2 mg/kg to about 5 mg/kg, from about 0.0001 mg/kg to about 1 mg/kg, from about 0.001 mg/kg to about 1 mg/kg, from about 0.005 mg/kg to about 1 mg/kg, from about 0.01 mg/kg to about 1 mg/kg, or from about 0.1 mg/kg to about 1 mg/kg in a given dose, where a dose of 1 mg/kg provides 1 mg of mRNA or nanoparticle per 1 kg of subject body weight. In particular embodiments, a dose of about 0.005 mg/kg to about 5 mg/kg of mRNA or nanoparticle of the invention may be administrated.

[1133] A dose may be administered one or more times per day, in the same or a different amount, to obtain a desired level of mRNA expression and/or effect (e.g., a therapeutic effect). The desired dosage may be delivered, for example, three times a day, two times a day, once a day, every other day, every third day, every week, every two weeks, every three weeks, or every four weeks. In certain embodiments, the desired dosage may be delivered using multiple administrations (e.g., two, three, four, five, six, seven, eight, nine, ten, eleven, twelve, thirteen, fourteen, or more administrations). In some embodiments, a single dose may be administered, for example, prior to or after a surgical procedure or in the instance of an acute disease, disorder, or condition. The specific therapeutically effective, prophylactically effective, or otherwise appropriate dose level for any particular patient will depend upon a variety of factors including the severity and identify of a disorder being treated, if any; the one or more mRNAs employed; the specific composition employed; the age, body weight, general health, sex, and diet of the patient; the time of administration, route of administration, and rate of excretion of the specific pharmaceutical composition employed; the duration of the treatment; drugs used in combination or coincidental with the specific pharmaceutical composition employed; and like factors well known in the medical arts.

[1134] In some embodiments, a pharmaceutical composition of the invention may be administered in combination with another agent, for example, another therapeutic agent, a prophylactic agent, and/or a diagnostic agent. By “in combination with,” it is not intended to imply that the agents must be administered at the same time and/or formulated for delivery together, although these methods of delivery are within the scope of the present disclosure. For example, one or more compositions including one or more different mRNAs may be administered in combination. Compositions can be administered concurrently with, prior to, or subsequent to, one or more other desired therapeutics or medical procedures. In general, each agent will be administered at a dose and/or on a time schedule determined for that agent. In some embodiments, the present disclosure encompasses the delivery of compositions of the invention, or imaging, diagnostic, or prophylactic compositions thereof in combination with agents that improve their bioavailability, reduce and/or modify their metabolism, inhibit their excretion, and/or modify their distribution within the body.

[1135] Exemplary therapeutic agents that may be administered in combination with the compositions of the invention include, but are not limited to, cytotoxic, chemotherapeutic, and other therapeutic agents. Cytotoxic agents may include, for example, taxol, cytochalasin B, gramicidin D, ethidium bromide, emetine, mitomycin, etoposide, teniposide, vincristine, vinblastine, colchicine, doxorubicin, daunorubicin, dihydroxyanthracinedione, mitoxantrone, mithramycin, actinomycin D, 1-dehydrotestosterone, glucocorticoids, procaine, tetracaine, lidocaine, propranolol, puromycin, maytansinoids, rachelmycin, and analogs thereof. Radioactive ions may also be used as therapeutic agents and may include, for example, radioactive iodine, strontium, phosphorous, palladium, cesium, iridium, cobalt, yttrium, samarium, and praseodymium. Other therapeutic agents may include, for example, antimetabolites (e.g., methotrexate, 6-mercaptopurine, 6-thioguanine, cytarabine, and 5-fluorouracil, and decarbazine), alkylating agents (e.g., mechlorethamine, thiotepa, chlorambucil, rachelmycin, melphalan, carmustine, lomustine, cyclophosphamide, busulfan, dibromomannitol, streptozotocin, mitomycin C, and cis-dichlorodiamine platinum (II) (DDP), and cisplatin), anthracyclines (e.g., daunorubicin and doxorubicin), antibiotics (e.g., dactinomycin, bleomycin, mithramycin, and anthramycin), and anti-mitotic agents (e.g., vincristine, vinblastine, taxol, and maytansinoids).

[1136] The particular combination of therapies (therapeutics or procedures) to employ in a combination regimen will take into account compatibility of the desired therapeutics and/or procedures and the desired therapeutic effect to be achieved. It will also be appreciated that the therapies employed may achieve a desired effect for the same disorder (for example, a composition useful for treating cancer may be administered concurrently with a chemotherapeutic agent), or they may achieve different effects (e.g., control of any adverse effects).

### Methods of Inducing Apoptosis

[1137] The invention provides methods of inducing apoptosis in a cell, e.g., a mammalian cell. In some embodiments, a method of inducing apoptosis in a cell involves contacting a cell with an mRNA described herein, e.g., an mRNA encoding one or more BH3 domains. In certain embodiments, such a method involves contacting a cell with an isolated mRNA encoding the one or more intracellular binding domains. In particular embodiments, the cell is contacted with a lipid nanoparticle composition including an mRNA encoding the one or more intracellular binding domains. Upon contacting the cell with the lipid nanoparticle composition or the isolated mRNA, the mRNA may be taken up and translated in the cell to produce one or more domains intracellularly.

[1138] The invention further provides methods of selectively inducing apoptosis in a cancer cell as compared to a normal cell. In some embodiments, a method of selectively inducing apoptosis in a cancer cell involves contacting a cell with an mRNA described herein, e.g., an mRNA encoding one or more BH3 domains, wherein the mRNA further comprises a regulatory element that reduces expression of the fusion polypeptide in normal cells as compared to cancer cells. In particular embodiments, the regulatory element is a binding site for a microRNA that has greater expression in normal cells than cancer cells (e.g., a miR-122 binding site), wherein binding of the microRNA to the binding site inhibits expression of the BH3 domain(s). In particular embodiments, the cell is contacted with a nanoparticle composition comprising an mRNA comprising a region encoding the BH3 domain(s) and a microRNA binding site. Upon contacting the cell with the nanoparticle composition or the isolated mRNA, the mRNA may be taken up and translated in the cell to produce the BH3 domain(s). Expression of the BH3 domain(s) is greater in cancer cells than normal cells, resulting in greater apoptosis of cancer cells than normal cells.

[1139] In some embodiments, a method of selectively inducing apoptosis in a cancer cell involves contacting a cell with a first mRNA described herein, e.g., an mRNA encoding one or more BH3 domains, optionally wherein the mRNA comprises a regulatory element that reduces expression of the BH3 domain(s) in normal cells as compared to cancer cells, and a second mRNA described herein, e.g., an mRNA encoding a prosurvival Bcl-2-like polypeptide or variant or fragment thereof, optionally wherein the second mRNA comprises a regulatory element that reduces expression of the Bcl-2-like polypeptide or variant thereof in cancer cells as compared to normal cells. In particular embodiments, the regulatory element in the first mRNA is a binding site for a microRNA that has greater expression in normal cells than cancer cells (e.g., a miR-122 binding site), wherein binding of the microRNA to the binding site inhibits expression of the fusion polypeptide. In particular embodiments, the regulatory element in the second mRNA is a binding site for a microRNA that has greater expression in cancer cells than normal cells (e.g., a miR-21 binding site), wherein binding of the microRNA to the binding site inhibits expression of the Bcl-2-like polypeptide or variant thereof. In particular embodiments, the cell is contacted with a nanoparticle composition comprising the first RNA and the second RNA. Upon contacting the cell with the lipid nanoparticle composition or the isolated mRNAs, the mRNAs may be taken up and translated in the cell to produce the BH3 domain(s) and the Bcl-2-like polypeptide or variant thereof. Expression of the BH3 domain(s) is greater in cancer cells than normal cells, resulting in greater apoptosis of cancer cells than normal cells. Expression of the Bcl-2-like polypeptide inhibits apoptosis induced by the BH3 domain(s). Since the Bcl-2-like polypeptide is expressed in higher amounts in normal cells, it inhibits a greater amount of apoptosis induced by the BH3 domain(s) in normal cells as compared to cancer cells. In particular embodiments, a normal cell is a non-cancerous cell of the same cell type, e.g., as the cancer cell.

[1140] In general, the step of contacting a mammalian cell with a composition (e.g., an isolated mRNA, nanoparticle, or pharmaceutical composition of the invention) may be performed in vivo, ex vivo, in culture, or in vitro. In exemplary embodiments of the invention, the step of contacting a mammalian cell with a composition (e.g., an isolated mRNA, nanoparticle, or pharmaceutical composition of the invention) is performed in vivo or ex vivo. The amount of the composition contacted with a cell, and/or the amount of mRNA therein, may depend on the type of cell or tissue being contacted, the means of administration, the physiochemical characteristics of the composition and the mRNA (e.g., size, charge, and chemical composition) therein, and other factors. In general, an effective amount of the composition will allow for efficient production of the encoded polypeptide in the cell. Metrics for efficiency may include polypeptide translation (indicated by polypeptide expression), level of mRNA degradation, and immune response indicators.

[1141] The step of contacting a composition including an mRNA, or an isolated mRNA, with a cell may involve or cause transfection. In some embodiments, a phospholipid included in a lipid nanoparticle may facilitate transfection and/or increase transfection efficiency, for example, by interacting and/or fusing with a cellular or intracellular membrane. Transfection may allow for the translation of the mRNA within the cell. Translation of one or more intracellular binding domains may induce apoptosis in the cell.

[1142] The ability of a composition of the invention (e.g., a lipid nanoparticle or isolated mRNA) to induce apoptosis may be readily determined, for example by comparing the ability of the composition to induce apoptosis as compared to known agents or manipulations that may induce apoptosis, including but not limited to: anti-Fas antibody or Fas ligand, staurosporin, interleukins, Apo3 ligand, and TRAIL. A wide variety of methods of determining whether an agent is capable of inducing apoptosis are known in the art, for example, caspase activation assays (e.g., caspase-3/7 activation assays), stains and dyes (e.g., CELLTOX™, MITOTRACKER® Red, propidium iodide, and YOYO3), cell viability assays, cell morphology, and detection of PARP-1 cleavage, for example, by Western blotting with an anti-PARP-1 antibody.

### Definitions

[1143] Administering: As used herein, “administering” refers to a method of delivering a composition to a subject or patient. A method of administration may be selected to target delivery (e.g., to specifically deliver) to a specific region or system of a body. For example, an administration may be parenteral (e.g., subcutaneous, intracutaneous, intravenous, intraperitoneal, intramuscular, intraarticular, intraarterial, intrasynovial, intrasternal, intrathecal, intralesional, or intracranial injection, as well as any suitable infusion technique), oral, trans- or intra-dermal, interdermal, rectal, intravaginal, topical (e.g. by powders, ointments, creams, gels, lotions, and/or drops), mucosal, nasal, buccal, enteral, vitreal, intratumoral, sublingual, intranasal; by intratracheal instillation, bronchial instillation, and/or inhalation; as an oral spray and/or powder, nasal spray, and/or aerosol, and/or through a portal vein catheter.

[1144] Apoptosis: As used herein, “apoptosis” refers to a form of cell death in which a programmed sequence of events leads to the death of a cell. Hallmarks of apoptosis include morphological changes, cell shrinkage, caspase activation, nuclear and cytoplasmic condensation, and alterations in plasma membrane topology. Biochemically, apoptotic cells are characterized by increased intracellular calcium concentration, fragmentation of chromosomal DNA, and expression of novel cell surface components. In particular embodiments, a cell undergoing apoptosis may undergo mitochondrial outer membrane permeabilization (MOMP).

[1145] Approximately, about: As used herein, the terms “approximately” or “about,” as applied to one or more values of interest, refers to a value that is similar to a stated reference value. In certain embodiments, the term “approximately” or “about” refers to a range of values that fall within 25%, 20%, 19%, 18%, 17%, 16%, 15%, 14%, 13%, 12%, 11%, 10%, 9%, 8%, 7%, 6%, 5%, 4%, 3%, 2%, 1%, or less in either direction (greater than or less than) of the stated reference value unless otherwise stated or otherwise evident from the context (except where such number would exceed 100% of a possible value).

[1146] Bcl-2 homology 3 (BH3) domain: As used herein, a Bcl-2 homology 3 (BH3) domain is a polypeptide or fragment thereof derived from or having homology to a conserved amino acid sequence from a Bcl-2 family protein. In some embodiments, a BH3 domain is capable of inhibiting an anti-apoptotic or prosurvival Bcl-2 family member (including, for example, BCL-2, BCL-X_{L}, BCL-w, MCL-1 and/or BCL2A1 (also referred to as A1)). Bcl-2 family members typically include at least one of four Bcl-2 homology domains (BH1 domain, BH2 domain, BH3 domain, and BH4 domain), which are highly conserved (see, for example, Ankevar et al. Front. Oncol. 1: 34, 2011). There are two main categories of Bcl-2 family proteins: pro-apoptotic Bcl-2 family members and anti-apoptotic Bcl-2 family members. Pro-apoptotic BCL family proteins include “effector” BCL-2 proteins (e.g., BAK and BAX) and “BH3-only” proteins (e.g., BID, BIM, BAD, BAK, BMF, bNIP3, HRK, Noxa, and PUMA). In particular embodiments, the BH3 domain is derived from a BH3-only protein.

[1147] Bcl-2-like polypeptide: As used herein, a “Bcl-2-like polypeptide” is a member of the Bcl-2 family of proteins that binds a BH3 peptide and, in certain instances, promotes cell survival. Members of the Bcl-2 protein family that promote cell survival include: Bcl-2, Bcl-X_{L}, Bcl-w, Mcl-1 and A-1. Bcl-2-like polypeptides also include variants of these prosurvival Bcl-2 family members that retain the ability to bind a BH3 domain and/or promote cell survival, which may be termed “functional variants.” “Variants” are polypeptides that include one or more amino acid modifications, e.g., deletions, substitutions or insertions, as compared to a wild-type Bcl-2-like polypeptide. Variants include both fragments of Bcl-2-like polypeptides.

[1148] Cancer: As used herein, “cancer” is a condition involving abnormal and/or unregulated cell growth. The term cancer encompasses benign and malignant cancers. Exemplary non-limiting cancers include adrenal cortical cancer, advanced cancer, anal cancer, aplastic anemia, bileduct cancer, bladder cancer, bone cancer, bone metastasis, brain tumors, brain cancer, breast cancer, childhood cancer, cancer of unknown primary origin, Castleman disease, cervical cancer, colorectal cancer, endometrial cancer, esophagus cancer, Ewing family of tumors, eye cancer, gallbladder cancer, gastrointestinal carcinoid tumors, gastrointestinal stromal tumors, gestational trophoblastic disease, Hodgkin disease, Kaposi sarcoma, renal cell carcinoma, laryngeal and hypopharyngeal cancer, acute lymphocytic leukemia, acute myeloid leukemia, chronic lymphocytic leukemia, chronic myeloid leukemia, chronic myelomonocytic leukemia, myelodysplastic syndrome (including refractory anemias and refractory cytopenias), myeloproliferative neoplasms or diseases (including polycythemia vera, essential thrombocytosis and primary myelofibrosis), liver cancer (e.g., hepatocellular carcinoma), non-small cell lung cancer, small cell lung cancer, lung carcinoid tumor, lymphoma of the skin, malignant mesothelioma, multiple myeloma, myelodysplasia syndrome, nasal cavity and paranasal sinus cancer, nasopharyngeal cancer, neuroblastoma, non-Hodgkin lymphoma, oral cavity and oropharyngeal cancer, osteosarcoma, ovarian cancer, pancreatic cancer, penile cancer, pituitary tumors, prostate cancer, retinoblastoma, rhabdomyosarcoma, salivary gland cancer, sarcoma in adult soft tissue, basal and squamous cell skin cancer, melanoma, small intestine cancer, stomach cancer, testicular cancer, throat cancer, thymus cancer, thyroid cancer, uterine sarcoma, vaginal cancer, vulvar cancer, Waldenstrom macroglobulinemia, Wilms tumor and secondary cancers caused by cancer treatment. In particular embodiments, the cancer is liver cancer (e.g., hepatocellular carcinoma) or colorectal cancer. In other embodiments, the cancer is a blood-based cancer or a hematopoetic cancer.

[1149] Cleavable Linker: As used herein, the term “cleavable linker” refers to a linker, typically a peptide linker (e.g., about 5-30 amino acids in length, typically about 10-20 amino acids in length) that can be incorporated into multicistronic mRNA constructs such that equimolar levels of multiple genes can be produced from the same mRNA. Non-limiting examples of cleavable linkers include the 2A family of peptides, including F2A, P2A, T2A and E2A, first discovered in picornaviruses, that when incorporated into an mRNA construct (e.g., between two polypeptide domains) function by making the ribosome skip the synthesis of a peptide bond at C-terminus of the 2A element, thereby leading to separation between the end of the 2A sequence and the next peptide downstream.

[1150] Conjugated: As used herein, the term “conjugated,” when used with respect to two or more moieties, means that the moieties are physically associated or connected with one another, either directly or via one or more additional moieties that serves as a linking agent, to form a structure that is sufficiently stable so that the moieties remain physically associated under the conditions in which the structure is used, e.g., physiological conditions. In some embodiments, two or more moieties may be conjugated by direct covalent chemical bonding. In other embodiments, two or more moieties may be conjugated by ionic bonding or hydrogen bonding.

[1151] Contacting: As used herein, the term “contacting” means establishing a physical connection between two or more entities. For example, contacting a cell with an mRNA or a lipid nanoparticle composition means that the cell and mRNA or lipid nanoparticle are made to share a physical connection. Methods of contacting cells with external entities both in vivo, in vitro, and ex vivo are well known in the biological arts. In exemplary embodiments of the invention, the step of contacting a mammalian cell with a composition (e.g., an isolated mRNA, nanoparticle, or pharmaceutical composition of the invention) is performed in vivo. For example, contacting a lipid nanoparticle composition and a cell (for example, a mammalian cell) which may be disposed within an organism (e.g., a mammal) may be performed by any suitable administration route (e.g., parenteral administration to the organism, including intravenous, intramuscular, intradermal, and subcutaneous administration). For a cell present in vitro, a composition (e.g., a lipid nanoparticle or an isolated mRNA) and a cell may be contacted, for example, by adding the composition to the culture medium of the cell and may involve or result in transfection. Moreover, more than one cell may be contacted by a nanoparticle composition.

[1152] Encapsulate: As used herein, the term “encapsulate” means to enclose, surround, or encase. In some embodiments, a compound, polynucleotide (e.g., an mRNA), or other composition may be fully encapsulated, partially encapsulated, or substantially encapsulated. For example, in some embodiments, an mRNA of the invention may be encapsulated in a lipid nanoparticle, e.g., a liposome.

[1153] Effective amount: As used herein, the term “effective amount” of an agent is that amount sufficient to effect beneficial or desired results, for example, clinical results, and, as such, an “effective amount” depends upon the context in which it is being applied. For example, in the context of administering an agent that treats cancer, an effective amount of an agent is, for example, an amount sufficient to achieve treatment, as defined herein, of cancer, as compared to the response obtained without administration of the agent. In some embodiments, a therapeutically effective amount is an amount of an agent to be delivered (e.g., nucleic acid, drug, therapeutic agent, diagnostic agent or prophylactic agent) that is sufficient, when administered to a subject suffering from or susceptible to an infection, disease, disorder, and/or condition, to treat, improve symptoms of, diagnose, prevent, and/or delay the onset of the infection, disease, disorder, and/or condition.

[1154] Expression: As used herein, “expression” of a nucleic acid sequence refers to one or more of the following events: (1) production of an RNA template from a DNA sequence (e.g., by transcription); (2) processing of an RNA transcript (e.g., by splicing, editing, 5′ cap formation, and/or 3′ end processing); (3) translation of an RNA into a polypeptide or protein; and (4) post-translational modification of a polypeptide or protein.

[1155] Identity: As used herein, the term “identity” refers to the overall relatedness between polymeric molecules, e.g., between polynucleotide molecules (e.g., DNA molecules and/or RNA molecules) and/or between polypeptide molecules. Calculation of the percent identity of two polynucleotide sequences, for example, can be performed by aligning the two sequences for optimal comparison purposes (e.g., gaps can be introduced in one or both of a first and a second nucleic acid sequences for optimal alignment and non-identical sequences can be disregarded for comparison purposes). In certain embodiments, the length of a sequence aligned for comparison purposes is at least 30%, at least 40%, at least 50%, at least 60%, at least 70%, at least 80%, at least 90%, at least 95%, or 100% of the length of the reference sequence. The nucleotides at corresponding nucleotide positions are then compared. When a position in the first sequence is occupied by the same nucleotide as the corresponding position in the second sequence, then the molecules are identical at that position. The percent identity between the two sequences is a function of the number of identical positions shared by the sequences, taking into account the number of gaps, and the length of each gap which needs to be introduced for optimal alignment of the two sequences. The comparison of sequences and determination of percent identity between two sequences can be accomplished using a mathematical algorithm. For example, the percent identity between two nucleotide sequences can be determined using methods such as those described in Computational Molecular Biology, Lesk, A. M., ed., Oxford University Press, New York, 1988; Biocomputing: Informatics and Genome Projects, Smith, D. W., ed., Academic Press, New York, 1993; Sequence Analysis in Molecular Biology, von Heinje, G., Academic Press, 1987; Computer Analysis of Sequence Data, Part I, Griffin, A. M., and Griffin, H. G., eds., Humana Press, New Jersey, 1994; and Sequence Analysis Primer, Gribskov, M. and Devereux, J., eds., M Stockton Press, New York, 1991; each of which is incorporated herein by reference. For example, the percent identity between two nucleotide sequences can be determined using the algorithm of Meyers and Miller (CABIOS, 1989, 4:11-17), which has been incorporated into the ALIGN program (version 2.0) using a PAM120 weight residue table, a gap length penalty of 12 and a gap penalty of 4. The percent identity between two nucleotide sequences can, alternatively, be determined using the GAP program in the GCG software package using an NWSgapdna.CMP matrix. Methods commonly employed to determine percent identity between sequences include, but are not limited to those disclosed in Carillo, H., and Lipman, D., SIAM J Applied Math., 48:1073 (1988); incorporated herein by reference. Techniques for determining identity are codified in publicly available computer programs. Exemplary computer software to determine homology between two sequences include, but are not limited to, GCG program package, Devereux et al., Nucleic Acids Research, 12(1): 387, 1984, BLASTP, BLASTN, and FASTA, Altschul, S. F. et al., J. Molec. Biol., 215, 403, 1990.

[1156] Fragment: A “fragment,” as used herein, refers to a portion. For example, fragments of proteins may include polypeptides obtained by digesting full-length protein isolated from cultured cells or obtained through recombinant DNA techniques.

[1157] Heterologous: As used herein, “heterologous” indicates that a sequence (e.g., an amino acid sequence or the polynucleotide that encodes an amino acid sequence) is not normally present in a given polypeptide or polynucleotide. For example, an amino acid sequence that corresponds to a domain or motif of one protein may be heterologous to a second protein.

[1158] Hydrophobic amino acid: As used herein, a “hydrophobic amino acid” is an amino acid having an uncharged, nonpolar side chain. Examples of naturally occurring hydrophobic amino acids are alanine (Ala), valine (Val), leucine (Leu), isoleucine (Ile), proline (Pro), phenylalanine (Phe), methionine (Met), and tryptophan (Trp).

[1159] Inducing Apoptosis: As used herein, “inducing apoptosis” is meant to indicate a process or method of triggering changes in a cell that, once initiated, will lead to apoptosis. The ability of a substance to induce apoptosis may be readily determined, for example by comparing the ability of a substance to induce apoptosis as compared to known agents or manipulations that may induce apoptosis, including but not limited to: anti-Fas antibody or Fas ligand, staurosporin, interleukins, Apo3 ligand, and TRAIL. A variety of methods of determining whether an agent can induce apoptosis are known in the art, for example, caspase activation assays (e.g., caspase-3/7 activation assays), stains and dyes (e.g., CELLTOX™ MITOTRACKER® Red, propidium iodide, and YOYO3), cell viability assays, cell morphology, and PARP-1 cleavage.

[1160] Insertion: As used herein, an “insertion” or an “addition” refers to a change in an amino acid or nucleotide sequence resulting in the addition of one or more amino acid residues or nucleotides, respectively, to a molecule as compared to a reference sequence, for example, the sequence found in a naturally-occurring molecule. For example, an amino acid sequence of a heterologous polypeptide (e.g., a BH3 domain) may be inserted into a scaffold polypeptide (e.g. a SteA scaffold polypeptide) at a site that is amenable to insertion. In some embodiments, an insertion may be a replacement, for example, if an amino acid sequence that forms a loop of a scaffold polypeptide (e.g., loop 1 or loop 2 of SteA or a SteA derivative) is replaced by an amino acid sequence of a heterologous polypeptide.

[1161] Insertion Site: As used herein, an “insertion site” is a position or region of a scaffold polypeptide that is amenable to insertion of an amino acid sequence of a heterologous polypeptide. It is to be understood that an insertion site also may refer to the position or region of the polynucleotide that encodes the polypeptide (e.g., a codon of a polynucleotide that codes for a given amino acid in the scaffold polypeptide). In some embodiments, insertion of an amino acid sequence of a heterologous polypeptide into a scaffold polypeptide has little to no effect on the stability (e.g., conformational stability), expression level, or overall secondary structure of the scaffold polypeptide.

[1162] Isolated: As used herein, the term “isolated” refers to a substance or entity that has been separated from at least some of the components with which it was associated (whether in nature or in an experimental setting). Isolated substances may have varying levels of purity in reference to the substances from which they have been associated. Isolated substances and/or entities may be separated from at least about 10%, about 20%, about 30%, about 40%, about 50%, about 60%, about 70%, about 80%, about 90%, or more of the other components with which they were initially associated. In some embodiments, isolated agents are more than about 80%, about 85%, about 90%, about 91%, about 92%, about 93%, about 94%, about 95%, about 96%, about 97%, about 98%, about 99%, or more than about 99% pure. As used herein, a substance is “pure” if it is substantially free of other components.

[1163] Liposome: As used herein, by “liposome” is meant a structure including a lipid-containing membrane enclosing an aqueous interior. Liposomes may have one or more lipid membranes. Liposomes include single-layered liposomes (also known in the art as unilamellar liposomes) and multi-layered liposomes (also known in the art as multilamellar liposomes).

[1164] Loop 1 insertion site: As used herein, a “loop 1 insertion site” is an insertion site of a SteA scaffold polypeptide in or near loop 1. In some embodiments, a loop 1 insertion site includes one or more of codons 46 to 54 inclusive of a SteA scaffold polypeptide that encode amino acids within or adjacent to loop 1 of a SteA scaffold polypeptide.

[1165] Loop 2 insertion site: As used herein, a “loop 2 insertion site” is an insertion site of a SteA scaffold polypeptide in or near loop 2. In some embodiments, a loop 2 insertion site includes one or more of codons 67 to 84 inclusive of a SteA scaffold polypeptide that encode amino acids within or adjacent to loop 2 of a SteA scaffold polypeptide.

[1166] Metastasis: As used herein, the term “metastasis” means the process by which cancer spreads from the place at which it first arose as a primary tumor to distant locations in the body. A secondary tumor that arose as a result of this process may be referred to as “a metastasis.” mRNA: As used herein, an “mRNA” refers to a messenger ribonucleic acid.

[1167] An mRNA may be naturally or non-naturally occurring. For example, an mRNA may include modified and/or non-naturally occurring components such as one or more nucleobases, nucleosides, nucleotides, or linkers. An mRNA may include a cap structure, a chain terminating nucleoside, a stem loop, a polyA sequence, and/or a polyadenylation signal. An mRNA may have a nucleotide sequence encoding a polypeptide. Translation of an mRNA, for example, in vivo translation of an mRNA inside a mammalian cell, may produce a polypeptide. Traditionally, the basic components of an mRNA molecule include at least a coding region, a 5′-untranslated region (5′-UTR), a 3′UTR, a 5′ cap and a polyA sequence.

[1168] microRNA (miRNA): As used herein, a “microRNA (miRNA)” is a small noncoding RNA molecule which may function in post-transcriptional regulation of gene expression (e.g., by RNA silencing, such as by cleavage of the mRNA, destabilization of the mRNA by shortening its polyA tail, and/or by interfering with the efficiency of translation of the mRNA into a polypeptide by a ribosome). A mature miRNA is typically about 22 nucleotides long.

[1169] microRNA-122 (miR-122): As used herein, “microRNA-122 (miR-122)” refers to any native miR-122 from any vertebrate source, including, for example, humans, unless otherwise indicated. miR-122 is typically highly expressed in the liver, where it may regulate fatty-acid metabolism. miR-122 levels are reduced in liver cancer, for example, hepatocellular carcinoma. miR-122 is one of the most highly-expressed miRNAs in the liver, where it regulates targets including but not limited to CAT-1, CD320, AldoA, Hjv, Hfe, ADAM10, IGFR1, CCNG1, and ADAM17. Mature human miR-122 may have a sequence of AACGCCAUUAUCACACUAAAUA (SEQ ID NO: 31, corresponding to hsa-miR-122-3p) or UGGAGUGUGACAAUGGUGUUUG (SEQ ID NO: 32, corresponding to hsa-miR-122-5p).

[1170] microRNA-21 (miR-21): As used herein, “microRNA-21 (miR-21)” refers to any native miR-21 from any vertebrate source, including, for example, humans, unless otherwise indicated. miR-21 levels are increased in liver cancer, for example, hepatocellular carcinoma, as compared to normal liver. Mature human miR-21 may have a sequence of UAGCUUAUCAGACUGAUGUUGA (SEQ ID NO: 33, corresponding to has-miR-21-5p) or 5′-CAACACCAGUCGAUGGGCUGU-3′ (SEQ ID NO: 34, corresponding to has-miR-21-3p). An additional miR-21 sequence is shown in SEQ ID NO: 106.

[1171] microRNA-142 (miR-142): As used herein, “microRNA-142 (miR-142)” refers to any native miR-142 from any vertebrate source, including, for example, humans, unless otherwise indicated. miR-142 is typically highly expressed in myeloid cells. Mature human miR-142 may have a sequence of UGUAGUGUUUCCUACUUUAUGGA (SEQ ID NO: 295, corresponding to hsa-miR-142-3p) or CAUAAAGUAGAAAGCACUACU (SEQ ID NO: 296, corresponding to hsa-miR-142-5p).

[1172] microRNA (miRNA) binding site: As used herein, a “microRNA (miRNA) binding site” refers to a miRNA target site or a miRNA recognition site, or any nucleotide sequence to which a miRNA binds or associates. In some embodiments, a miRNA binding site represents a nucleotide location or region of a polynucleotide (e.g., an mRNA) to which at least the “seed” region of a miRNA binds. It should be understood that “binding” may follow traditional Watson-Crick hybridization rules or may reflect any stable association of the miRNA with the target sequence at or adjacent to the microRNA site.

[1173] miRNA seed: As used herein, a “seed” region of a miRNA refers to a sequence in the region of positions 2-8 of a mature miRNA, which typically has perfect Watson-Crick complementarity to the miRNA binding site. A miRNA seed may include positions 2-8 or 2-7 of a mature miRNA. In some embodiments, a miRNA seed may comprise 7 nucleotides (e.g., nucleotides 2-8 of a mature miRNA), wherein the seed-complementary site in the corresponding miRNA binding site is flanked by an adenine (A) opposed to miRNA position 1. In some embodiments, a miRNA seed may comprise 6 nucleotides (e.g., nucleotides 2-7 of a mature miRNA), wherein the seed-complementary site in the corresponding miRNA binding site is flanked by an adenine (A) opposed to miRNA position 1. When referring to a miRNA binding site, an miRNA seed sequence is to be understood as having complementarity (e.g., partial, substantial, or complete complementarity) with the seed sequence of the miRNA that binds to the miRNA binding site.

[1174] Modified: As used herein “modified” refers to a changed state or structure of a molecule of the invention. Molecules may be modified in many ways including chemically, structurally, and functionally. In one embodiment, the mRNA molecules of the present invention are modified by the introduction of non-natural nucleosides and/or nucleotides, e.g., as it relates to the natural ribonucleotides A, U, G, and C. Noncanonical nucleotides such as the cap structures are not considered “modified” although they differ from the chemical structure of the A, C, G, U ribonucleotides.

[1175] Nanoparticle: As used herein, “nanoparticle” refers to a particle having any one structural feature on a scale of less than about 1000 nm that exhibits novel properties as compared to a bulk sample of the same material. Routinely, nanoparticles have any one structural feature on a scale of less than about 500 nm, less than about 200 nm, or about 100 nm. Also routinely, nanoparticles have any one structural feature on a scale of from about 50 nm to about 500 nm, from about 50 nm to about 200 nm or from about 70 to about 120 mn. In exemplary embodiments, a nanoparticle is a particle having one or more dimensions of the order of about 1-1000 nm. In other exemplary embodiments, a nanoparticle is a particle having one or more dimensions of the order of about 10-500 nm. In other exemplary embodiments, a nanoparticle is a particle having one or more dimensions of the order of about 50-200 nm. A spherical nanoparticle would have a diameter, for example, of between about 50-100 or 70-120 nanometers. A nanoparticle most often behaves as a unit in terms of its transport and properties. It is noted that novel properties that differentiate nanoparticles from the corresponding bulk material typically develop at a size scale of under 1000 nm, or at a size of about 100 nm, but nanoparticles can be of a larger size, for example, for particles that are oblong, tubular, and the like. Although the size of most molecules would fit into the above outline, individual molecules are usually not referred to as nanoparticles.

[1176] N-terminal insertion site: As used herein, an “N-terminal insertion site” is an insertion site of a SteA scaffold polypeptide in the N-terminus. In some embodiments, an N-terminal insertion site includes one or more of the first 8 codons encoding the first 8 amino acids of a SteA scaffold polypeptide. In particular embodiments, an N-terminal insertion site is position 4 of a SteA scaffold polypeptide.

[1177] Nucleic acid: As used herein, the term “nucleic acid” is used in its broadest sense and encompasses any compound and/or substance that includes a polymer of nucleotides. These polymers are often referred to as polynucleotides. Exemplary nucleic acids or polynucleotides of the invention include, but are not limited to, ribonucleic acids (RNAs), deoxyribonucleic acids (DNAs), DNA-RNA hybrids, RNAi-inducing agents, RNAi agents, siRNAs, shRNAs, miRNAs, antisense RNAs, ribozymes, catalytic DNA, RNAs that induce triple helix formation, threose nucleic acids (TNAs), glycol nucleic acids (GNAs), peptide nucleic acids (PNAs), locked nucleic acids (LNAs, including LNA having a β-D-ribo configuration, α-LNA having an α-L-ribo configuration (a diastereomer of LNA), 2′-amino-LNA having a 2′-amino functionalization, and 2′-amino-α-LNA having a 2′-amino functionalization) or hybrids thereof.

[1178] Patient: As used herein, “patient” refers to a subject who may seek or be in need of treatment, requires treatment, is receiving treatment, will receive treatment, or a subject who is under care by a trained professional for a particular disease or condition. In particular embodiments, a patient is a human patient. In some embodiments, a patient is a patient suffering from cancer (e.g., liver cancer or colorectal cancer).

[1179] Pharmaceutically acceptable: The phrase “pharmaceutically acceptable” is employed herein to refer to those compounds, materials, compositions, and/or dosage forms which are, within the scope of sound medical judgment, suitable for use in contact with the tissues of human beings and animals without excessive toxicity, irritation, allergic response, or other problem or complication, commensurate with a reasonable benefit/risk ratio.

[1180] Pharmaceutically acceptable excipient: The phrase “pharmaceutically acceptable excipient,” as used herein, refers any ingredient other than the compounds described herein (for example, a vehicle capable of suspending or dissolving the active compound) and having the properties of being substantially nontoxic and non-inflammatory in a patient. Excipients may include, for example: antiadherents, antioxidants, binders, coatings, compression aids, disintegrants, dyes (colors), emollients, emulsifiers, fillers (diluents), film formers or coatings, flavors, fragrances, glidants (flow enhancers), lubricants, preservatives, printing inks, sorbents, suspensing or dispersing agents, sweeteners, and waters of hydration. Exemplary excipients include, but are not limited to: butylated hydroxytoluene (BHT), calcium carbonate, calcium phosphate (dibasic), calcium stearate, croscarmellose, crosslinked polyvinyl pyrrolidone, citric acid, crospovidone, cysteine, ethylcellulose, gelatin, hydroxypropyl cellulose, hydroxypropyl methylcellulose, lactose, magnesium stearate, maltitol, mannitol, methionine, methylcellulose, methyl paraben, microcrystalline cellulose, polyethylene glycol, polyvinyl pyrrolidone, povidone, pregelatinized starch, propyl paraben, retinyl palmitate, shellac, silicon dioxide, sodium carboxymethyl cellulose, sodium citrate, sodium starch glycolate, sorbitol, starch (corn), stearic acid, sucrose, talc, titanium dioxide, vitamin A, vitamin E, vitamin C, and xylitol.

[1181] Pharmaceutically acceptable salts: As used herein, “pharmaceutically acceptable salts” refers to derivatives of the disclosed compounds wherein the parent compound is modified by converting an existing acid or base moiety to its salt form (e.g., by reacting the free base group with a suitable organic acid). Examples of pharmaceutically acceptable salts include, but are not limited to, mineral or organic acid salts of basic residues such as amines; alkali or organic salts of acidic residues such as carboxylic acids; and the like. Representative acid addition salts include acetate, acetic acid, adipate, alginate, ascorbate, aspartate, benzenesulfonate, benzene sulfonic acid, benzoate, bisulfate, borate, butyrate, camphorate, camphorsulfonate, citrate, cyclopentanepropionate, digluconate, dodecylsulfate, ethanesulfonate, fumarate, glucoheptonate, glycerophosphate, hemisulfate, heptonate, hexanoate, hydrobromide, hydrochloride, hydroiodide, 2-hydroxy-ethanesulfonate, lactobionate, lactate, laurate, lauryl sulfate, malate, maleate, malonate, methanesulfonate, 2-naphthalenesulfonate, nicotinate, nitrate, oleate, oxalate, palmitate, pamoate, pectinate, persulfate, 3-phenylpropionate, phosphate, picrate, pivalate, propionate, stearate, succinate, sulfate, tartrate, thiocyanate, toluenesulfonate, undecanoate, valerate salts, and the like. Representative alkali or alkaline earth metal salts include sodium, lithium, potassium, calcium, magnesium, and the like, as well as nontoxic ammonium, quaternary ammonium, and amine cations, including, but not limited to ammonium, tetramethylammonium, tetraethylammonium, methylamine, dimethylamine, trimethylamine, triethylamine, ethylamine, and the like. The pharmaceutically acceptable salts of the present disclosure include the conventional non-toxic salts of the parent compound formed, for example, from non-toxic inorganic or organic acids. The pharmaceutically acceptable salts of the present disclosure can be synthesized from the parent compound which contains a basic or acidic moiety by conventional chemical methods. Generally, such salts can be prepared by reacting the free acid or base forms of these compounds with a stoichiometric amount of the appropriate base or acid in water or in an organic solvent, or in a mixture of the two; generally, nonaqueous media like ether, ethyl acetate, ethanol, isopropanol, or acetonitrile are preferred. Lists of suitable salts are found in Remington's Pharmaceutical Sciences, 17th ed., Mack Publishing Company, Easton, Pa., 1985, p. 1418, Pharmaceutical Salts: Properties, Selection, and Use, P. H. Stahl and C. G. Wermuth (eds.), Wiley-VCH, 2008, and Berge et al., Journal of Pharmaceutical Science, 66, 1-19 (1977), each of which is incorporated herein by reference in its entirety.

[1182] Polypeptide: As used herein, the term “polypeptide” or “polypeptide of interest” refers to a polymer of amino acid residues typically joined by peptide bonds that can be produced naturally (e.g., isolated or purified) or synthetically.

[1183] Stefin A (SteA) scaffold polypeptide: By “Stefin A (SteA) scaffold polypeptide” is meant a SteA polypeptide or any derivative thereof able to accept an insertion of a heterologous polypeptide amino acid sequence. In some embodiments, a SteA scaffold polypeptide includes an N-terminal insertion site, a loop 1 insertion site, and/or a loop 2 insertion site. Exemplary SteA scaffold polypeptides include wild-type Stefin A (for example, human Stefin A, also known as cystatin A), STM (Stefin A Triple Mutant, as described, e.g., in U.S. Pat. No. 8,063,019, incorporated herein by reference, and in Woodman et al., J. Mol. Biol. 352: 1118-1133, 2005), SQM (Stefin A Quadruple Mutant, as described, e.g., in U.S. Pat. No. 8,853,131, incorporated herein by reference), and SQT (Stefin A Quadruple Mutant, Tracy, as described, e.g., in U.S. Pat. No. 8,853,131, incorporated herein by reference and Stadler et al., Protein Eng. Des. Sel. 24(9): 751-763, 2011). Additional exemplary SteA scaffold proteins are described in U.S. Pat. No. 8,853,131, incorporated herein by reference, including SDM, SUC, SUM, SUN, SDM-, SDM--, SQM-, SQM--, SUC-, SUC--, SUM-, SUM--, SUN-, SUN--, and SQL.

[1184] Subject: As used herein, the term “subject” refers to any organism to which a composition in accordance with the invention may be administered, e.g., for experimental, diagnostic, prophylactic, and/or therapeutic purposes. Typical subjects include animals (e.g., mammals such as mice, rats, rabbits, non-human primates, and humans) and/or plants. In some embodiments, a subject may be a patient.

[1185] Substantially: As used herein, the term “substantially” refers to the qualitative condition of exhibiting total or near-total extent or degree of a characteristic or property of interest. One of ordinary skill in the biological arts will understand that biological and chemical phenomena rarely, if ever, go to completion and/or proceed to completeness or achieve or avoid an absolute result. The term “substantially” is therefore used herein to capture the potential lack of completeness inherent in many biological and chemical phenomena.

[1186] Suffering from: An individual who is “suffering from” a disease, disorder, and/or condition has been diagnosed with or displays one or more symptoms of a disease, disorder, and/or condition.

[1187] Targeting moiety: As used herein, a “targeting moiety” is a compound or agent that may target a nanoparticle to a particular cell, tissue, and/or organ type.

[1188] Therapeutic Agent: The term “therapeutic agent” refers to any agent that, when administered to a subject, has a therapeutic, diagnostic, and/or prophylactic effect and/or elicits a desired biological and/or pharmacological effect.

[1189] Transfection: As used herein, the term “transfection” refers to methods to introduce a species (e.g., a polynucleotide, such as a mRNA) into a cell.

[1190] Treating: As used herein, the term “treating” refers to partially or completely alleviating, ameliorating, improving, relieving, delaying onset of, inhibiting progression of, reducing severity of, and/or reducing incidence of one or more symptoms or features of a particular infection, disease, disorder, and/or condition. For example, “treating” cancer may refer to inhibiting survival, growth, and/or spread of a tumor. Treatment may be administered to a subject who does not exhibit signs of a disease, disorder, and/or condition and/or to a subject who exhibits only early signs of a disease, disorder, and/or condition for the purpose of decreasing the risk of developing pathology associated with the disease, disorder, and/or condition.

[1191] Preventing: As used herein, the term “preventing” refers to partially or completely inhibiting the onset of one or more symptoms or features of a particular infection, disease, disorder, and/or condition.

[1192] Tumor: As used herein, a “tumor” is an abnormal growth of tissue, whether benign or malignant.

[1193] Unmodified: As used herein, “unmodified” refers to any substance, compound or molecule prior to being changed in any way. Unmodified may, but does not always, refer to the wild type or native form of a biomolecule. Molecules may undergo a series of modifications whereby each modified molecule may serve as the “unmodified” starting molecule for a subsequent modification.

[1194] Uridine Content: The terms “uridine content” or “uracil content” are interchangeable and refer to the amount of uracil or uridine present in a certain nucleic acid sequence. Uridine content or uracil content can be expressed as an absolute value (total number of uridine or uracil in the sequence) or relative (uridine or uracil percentage respect to the total number of nucleobases in the nucleic acid sequence).

[1195] Uridine-Modified Sequence: The terms “uridine-modified sequence” refers to a sequence optimized nucleic acid (e.g., a synthetic mRNA sequence) with a different overall or local uridine content (higher or lower uridine content) or with different uridine patterns (e.g., gradient distribution or clustering) with respect to the uridine content and/or uridine patterns of a candidate nucleic acid sequence. In the content of the present disclosure, the terms “uridine-modified sequence” and “uracil-modified sequence” are considered equivalent and interchangeable.

[1196] A “high uridine codon” is defined as a codon comprising two or three uridines, a “low uridine codon” is defined as a codon comprising one uridine, and a “no uridine codon” is a codon without any uridines. In some embodiments, a uridine-modified sequence comprises substitutions of high uridine codons with low uridine codons, substitutions of high uridine codons with no uridine codons, substitutions of low uridine codons with high uridine codons, substitutions of low uridine codons with no uridine codons, substitution of no uridine codons with low uridine codons, substitutions of no uridine codons with high uridine codons, and combinations thereof. In some embodiments, a high uridine codon can be replaced with another high uridine codon. In some embodiments, a low uridine codon can be replaced with another low uridine codon. In some embodiments, a no uridine codon can be replaced with another no uridine codon. A uridine-modified sequence can be uridine enriched or uridine rarefied.

[1197] Uridine Enriched: As used herein, the terms “uridine enriched” and grammatical variants refer to the increase in uridine content (expressed in absolute value or as a percentage value) in an sequence optimized nucleic acid (e.g., a synthetic mRNA sequence) with respect to the uridine content of the corresponding candidate nucleic acid sequence. Uridine enrichment can be implemented by substituting codons in the candidate nucleic acid sequence with synonymous codons containing less uridine nucleobases. Uridine enrichment can be global (i.e., relative to the entire length of a candidate nucleic acid sequence) or local (i.e., relative to a subsequence or region of a candidate nucleic acid sequence).

[1198] Uridine Rarefied: As used herein, the terms “uridine rarefied” and grammatical variants refer to a decrease in uridine content (expressed in absolute value or as a percentage value) in an sequence optimized nucleic acid (e.g., a synthetic mRNA sequence) with respect to the uridine content of the corresponding candidate nucleic acid sequence. Uridine rarefication can be implemented by substituting codons in the candidate nucleic acid sequence with synonymous codons containing less uridine nucleobases. Uridine rarefication can be global (i.e., relative to the entire length of a candidate nucleic acid sequence) or local (i.e., relative to a subsequence or region of a candidate nucleic acid sequence.

[1199] Yes-associated protein (YAP): As used herein, Yes-associated protein (YAP) is a member of the Hippo pathway. In certain embodiments, YAP includes YAP1. When the Hippo pathway is “on”, mammalian STE20-like protein kinase 1 (MST1) or MST2 phosphorylate Salvador homolog1 (SAV1), and together they phosphorylate and activate MOB kinase activator 1A (MOB1A), MOB1B, large tumor suppressor homolog 1 (LATS1) kinase and LATS2 kinase, which then phosphorylate YAP and transcriptional co-activator with PDZ-binding motif (TAZ). Phosphorylated YAP and TAZ are sequestered in the cytoplasm by the 14-3-3 protein and shunted for proteasomal degradation. As a result, the TEA domain-containing sequence-specific transcription factors (TEADs) associate with the transcription co-factor vestigial-like protein 4 (VGLL4) and suppress target gene expression. When the Hippo pathway is “off”, the kinases MST1, MST2, LATS1 and LATS2 are inactive, therefore YAP and TAZ accumulate in the nucleus where they displace VGLL4 and form a complex with TEADs, thereby promoting the expression of target genes. (see e.g., Meng et al., Genes & Dev. Vol. 30: 1-17, 2016)

[1200] YAP binding polypeptide: As used herein, a Yes-associated protein (YAP) binding polypeptide, used interchangeably with “YAP inhibitory domain”, is a polypeptide or fragment thereof derived from or having homology to a conserved amino acid sequence from a Vestigial-like protein (VGLL) family member (including, for example, VGLL1, VGLL2, VGLL3, and/or VGLL4). In some embodiments, a YAP inhibitory domain is capable of displacing YAP from the TEADs and inhibiting expression of target genes.

### EQUIVALENTS AND SCOPE

[1201] Those skilled in the art will recognize, or be able to ascertain using no more than routine experimentation, many equivalents to the specific embodiments in accordance with the invention described herein. The scope of the present invention is not intended to be limited to the Description below, but rather is as set forth in the appended claims.

[1202] In the claims, articles such as “a,” “an,” and “the” may mean one or more than one unless indicated to the contrary or otherwise evident from the context. Claims or descriptions that include “or” between one or more members of a group are considered satisfied if one, more than one, or all of the group members are present in, employed in, or otherwise relevant to a given product or process unless indicated to the contrary or otherwise evident from the context. The invention includes embodiments in which exactly one member of the group is present in, employed in, or otherwise relevant to a given product or process. The invention includes embodiments in which more than one, or all of the group members are present in, employed in, or otherwise relevant to a given product or process.

[1203] It is also noted that the term “comprising” is intended to be open and permits but does not require the inclusion of additional elements or steps. When the term “comprising” is used herein, the term “consisting of” is thus also encompassed and disclosed.

[1204] Where ranges are given, endpoints are included. Furthermore, it is to be understood that unless otherwise indicated or otherwise evident from the context and understanding of one of ordinary skill in the art, values that are expressed as ranges can assume any specific value or subrange within the stated ranges in different embodiments of the invention, to the tenth of the unit of the lower limit of the range, unless the context clearly dictates otherwise.

[1205] All cited sources, for example, references, publications, databases, database entries, and art cited herein, are incorporated into this application by reference, even if not expressly stated in the citation. In case of conflicting statements of a cited source and the instant application, the statement in the instant application shall control.

### EXAMPLES

[1206] The invention will be more fully understood by reference to the following examples. They should not, however, be construed as limiting the scope of the invention. It is understood that the examples and embodiments described herein are for illustrative purposes only and that various modifications or changes in light thereof will be suggested to persons skilled in the art and are to be included within the spirit and purview of this application and scope of the appended claims.

### Example 1

### Preparation and Expression of mRNAs Encoding Scaffold-Less BH3 Domains

[1207] A series of modified mRNA constructs were prepared that encoded one or more copies of selected BH3 domains from the “BH3 only” family of pro-apoptotic BCL-2 family proteins (PUMA, Bim, Bad and Noxa) in the absence of any “scaffold” polypeptide. Constructs containing multiple BH3 domains also encoded a linker sequence (e.g., an F2A or P2A cleavable linker) between each BH3 domain. Thus, for example, a multimeric BH3 construct containing three BH3 domains with intervening F2A linkers has the structure: BH3-F2A-BH3-F2A-BH3. The constructs also typically contained an epitope tag (e.g., FLAG, His, v5) to facilitate detection of the encoded polypeptide(s). Some multimeric BH3 constructs contained F2A linkers between each BH3 domain and before the C-terminal epitope tag (e.g., having the structure: BH3-F2A-BH3-F2A-BH3-F2A-affinity tag). Certain constructs also included one or more miR binding sites (e.g., miR122 binding site, miR142.3p binding site). Certain construct encoded only a single BH3 domain, while other “multimer” constructs encoded three, five or ten BH3 domains. In certain multimer constructs, multiple copies of the same BH3 domain were used. In other multimer constructs, different BH3 domains were used in combination to achieve the multiple copies of BH3 domains in the construct. The amino acid sequence encoded by the open reading frame (ORF) of each construct is shown below in Table 15:

TABLE 15

| | | SEQ |
|---|---|---|
| | | ID |
| mRNA Name(s) | ORF Amino Acid Sequence | NO |
| PumaBH3_HS3UPCRfree | MEEQWAREIGAQLRRMADDLNAQYERR | 142 |
| PumaBH3.nHIS_HS3UPCRfree | MHHHHHHEEQWAREIGAQLRRMADDL | 143 |
| | NAQYERR | |
| PumaBH3.nV5_HS3UPCRfree | MGKPIPNPLLGLDSTEEQWAREIGAQLRR | 144 |
| | MADDLNAQYERR | |
| PumaBH3.cHIS_HS3UPCRfree | MEEQWAREIGAQLRRMADDLNAQYERR | 145 |
| | HHHHHH | |
| PumaBH3(x3.F2A).v5_ | MEEQWAREIGAQLRRMADDLNAQYERR | 146 |
| Hs3UPCRfree | GSGVKQTLNFDLLKLAGDVESNPGPEEQW | |
| | AREIGAQLRRMADDLNAQYERRGSGVKQT | |
| | LNFDLLKLAGDVESNPGPEEQWAREIGAQL | |
| | RRMADDLNAQYERRGKPIPNPLLGLDST | |
| PumaBH3.cV5_HS3UPCRfree | MEEQWAREIGAQLRRMADDLNAQYERR | 147 |
| | GKPIPNPLLGLDST | |
| PumaBH3(x3.F2A).v5_miR142.3p | MEEQWAREIGAQLRRMADDLNAQYERRG | 148 |
| _tp | SGVKQTLNFDLLKLAGDVESNPGPEEQWAR | |
| | EIGAQLRRMADDLNAQYERRGSGVKQTLNF | |
| | DLLKLAGDVESNPGPEEQWAREIGAQLRRM | |
| | ADDLNAQYERRGKPIPNPLLGLDST | |
| PumaBH3(x3.F2A).v5_miR122/1 | MEEQWAREIGAQLRRMADDLNAQYERRGS | 149 |
| 42.3p_tp | GVKQTLNFDLLKLAGDVESNPGPEEQWAREI | |
| | GAQLRRMADDLNAQYERRGSGVKQTLNFDL | |
| | LKLAGDVESNPGPEEQWAREIGAQLRRMAD | |
| | DLNAQYERRGKPIPNPLLGLDST | |
| PumaBH3(x3.F2A).v5_tp | MEEQWAREIGAQLRRMADDLNAQYERRGS | 150 |
| | GVKQTLNFDLLKLAGDVESNPGPEEQWAREI | |
| | GAQLRRMADDLNAQYERRGSGVKQTLNFDL | |
| | LKLAGDVESNPGPEEQWAREIGAQLRRMAD | |
| | DLNAQYERRGKPIPNPLLGLDST | |
| PumaBH3(x3.F2A).v5_miR122_ | MEEQWAREIGAQLRRMADDLNAQYERRGS | 151 |
| tp | GVKQTLNFDLLKLAGDVESNPGPEEQWAREI | |
| | GAQLRRMADDLNAQYERRGSGVKQTLNFDL | |
| | LKLAGDVESNPGPEEQWAREIGAQLRRMAD | |
| | DLNAQYERRGKPIPNPLLGLDST | |
| (pumaBH3.F2A)\hat{ }5_cV5, | MEEQWAREIGAQLRRMADDLNAQYERRGS | 152 |
| (pumaBH3.F2A)\hat{ }5_cV5_DX | GVKQTLNFDLLKLAGDVESNPGPEEQWAREI | |
| | GAQLRRMADDLNAQYERRGSGVKQTLNFDL | |
| | KAGDVESNPGPEEQWAREIGAQLRRMADDN | |
| | AQYERRGSGVKQTLNFDLLKLAGDVESNPGP | |
| | EEQWAREIGAQLRRMADDLNAQYERRGSGV | |
| | KQTLNFDLLKLAGDVESNPGPEEQWAREIGA | |
| | QLRRMADDLNAQYERRGSGVKQTLNFDLLK | |
| | LAGDVESNPGPGKPIPNPLLGLDST | |
| (BimBH3.F2A)\hat{ }5_cV5, | MDMRPEIWIAQELRRIGDEFNAYYARRGSGV | 153 |
| (BimBH3.F2A)\hat{ }5_cV5_DX | KQTLNFDLLKLAGDVESNPGPDMRPEIWIAQ | |
| | ELRRIGDEFNAYYARRGSGVKQTLNFDLLKLA | |
| | GDVESNPGPDMRPEIWIAQELRRIGDEFNAY | |
| | YARRGSGVKQTLNFDLLKLAGDVESNPGPDM | |
| | RPEIWIAQELRRIGDEFNAYYARRGSGVKQTL | |
| | NFDLLKLAGDVESNPGPDMRPEIWIAQELRRI | |
| | GDEFNAYYARRGSGVKQTLNFDLLKLAGDVE | |
| | SNPGPGKPIPNPLLGLDST | |
| (SuperPumaBH3.F2A)\hat{ }3_cV5 | MQWAREIGAQLRRIGDDLNAQYERRRQGSG | 154 |
| | VKQTLNFDLLKLAGDVESNPGPQWAREIGAQ | |
| | LRRIGDDLNAQYERRRQGSGVKQTLNFDLLKL | |
| | AGDVESNPGPQWAREIGAQLRRIGDDLNAQ | |
| | YERRRQGSGVKQTLNFDLLKLAGDVESNPGP | |
| | GSGVKQTLNFDLLKLAGDVESNPGPGKPIPNP | |
| | LLGLDST | |
| (SuperPumaBH3.F2A)\hat{ }5_cV5 | MQWAREIGAQLRRIGDDLNAQYERRRQGSV | 155 |
| | KQTLNFDLLKLAGDVESNPGPQWAREIGAQR | |
| | RIGDDLNAQYERRRQGSGVKQTLNFDLLKLAG | |
| | DVESNPGPQWAREIGAQLRRIGDDLNAQYER | |
| | RRQGSGVKQTLNFDLLKLAGDVESNPGPQA | |
| | REIGAQLRRIGDDLNAQYERRRQGSGVKQTN | |
| | FDLLKLAGDVESNPGPQWAREIGAQLRRIGD | |
| | LNAQYERRRQGSGVKQTLNFDLLKLAGDVEN | |
| | PGPGKPIPNPLLGLDST | |
| (KittyCatBH3.F2A)\hat{ }5_cV5, | MQWAREIGAQERREADDENAQYERRRQGS | 156 |
| (KittyCatBH3.F2A)\hat{ }5_cV5_DX | GVKQTLNFDLLKLAGDVESNPGPQWAREIGA | |
| | QERREADDENAQYERRRQGSGVKQTLNFDLL | |
| | KLAGDVESNPGPQWAREIGAQERREADDENA | |
| | QYERRRQGSGVKQTLNFDLLKLAGDVESNPGP | |
| | QWAREIGAQERREADDENAQYERRRQGSGVK | |
| | QTLNFDLLKLAGDVESNPGPQWAREIGAQERR | |
| | EADDENAQYERRRQGSGVKQTLNFDLLKLAGD | |
| | VESNPGPGKPIPNPLLGLDST | |
| (KittyCatBH3.F2A)\hat{ }5_cV5, | MQWAREIGAQERREADDENAQYERRRQGSG | 157 |
| (KittyCatBH3.F2A)\hat{ }5_cV5_DX | VKQTLNFDLLKLAGDVESNPGPQWAREIGAQ | |
| | ERREADDENAQYERRRQGSGVKQTLNFDLLKL | |
| | AGDVESNPGPQWAREIGAQERREADDENAQY | |
| | ERRRQGSGVKQTLNFDLLKLAGDVESNPGPQW | |
| | AREIGAQERREADDENAQYERRRQGSGVKQTL | |
| | NFDLLKLAGDVESNPGPQWAREIGAQERREAD | |
| | DENAQYERRRQGSGVKQTLNFDLLKLAGDVES | |
| | NPGPGKPIPNPLLGLDST | |
| (BadBH3.F2A)\hat{ }5_cV5 | MNLWAAQRYGRELRRMSDEFVDSFKKGGSG | 158 |
| | VKQTLNFDLLKLAGDVESNPGPNLWAAQRYG | |
| | RELRRMSDEFVDSFKKGGSGVKQTLNFDLLKLA | |
| | GDVESNPGPNLWAAQRYGRELRRMSDEFVDS | |
| | FKKGGSGVKQTLNFDLLKLAGDVESNPGPNLW | |
| | AAQRYGRELRRMSDEFVDSFKKGGSGVKQTL | |
| | NFDLLKLAGDVESNPGPNLWAAQRYGRELRR | |
| | MSDEFVDSFKKGGSGVKQTLNFDLLKLAGDV | |
| | ESNPGPGKPIPNPLLGLDST | |
| (Noxa-F2A-BadBH3-F2A)\hat{ }3_cV5 | MPAELEVECATQLRRFGDKLNFRQKLLGSGVK | 159 |
| | QTLNFDLLKLAGDVESNPGPNLWAAQRYGREL | |
| | RRMSDEFVDSFKKGGSGVKQTLNFDLLKLAGD | |
| | VESNPGPPAELEVECATQLRRFGDKLNFRQKLL | |
| | GSGVKQTLNFDLLKLAGDVESNPGPNLWAAQ | |
| | RYGRELRRMSDEFVDSFKKGGSGVKQTLNFDL | |
| | LKLAGDVESNPGPPAELEVECATQLRRFGDKLN | |
| | FRQKLLGSGVKQTLNFDLLKLAGDVESNPGPNL | |
| | WAAQRYGRELRRMSDEFVDSFKKGGSGVKQT | |
| | LNFDLLKLAGDVESNPGPGKPIPNPLLGLDST | |
| (pumaBH3.F2A)\hat{ }10_cV5, | MEEQWAREIGAQLRRMADDLNAQYERRGSG | 160 |
| (pumaBH3.F2A)\hat{ }10_cV5_DX | VKQTLNFDLLKLAGDVESNPGPEEQWAREIGA | |
| | QLRRMADDLNAQYERRGSGVKQTLNFDLLKLA | |
| | GDVESNPGPEEQWAREIGAQLRRMADDLNAQ | |
| | YERRGSGVKQTLNFDLLKLAGDVESNPGPEEQW | |
| | AREIGAQLRRMADDLNAQYERRGSGVKQTLNF | |
| | DLLKLAGDVESNPGPEEQWAREIGAQLRRMAD | |
| | DLNAQYERRGSGVKQTLNFDLLKLAGDVESNPG | |
| | PEEQWAREIGAQLRRMADDLNAQYERRGSGVK | |
| | QTLNFDLLKLAGDVESNPGPEEQWAREIGAQLR | |
| | RMADDLNAQYERRGSGVKQTLNFDLLKLAGDVE | |
| | SNPGPEEQWAREIGAQLRRMADDLNAQYERRG | |
| | SGVKQTLNFDLLKLAGDVESNPGPEEQWAREIGA | |
| | QLRRMADDLNAQYERRGSGVKQTLNFDLLKLAG | |
| | DVESNPGPEEQWAREIGAQLRRMADDLNAQYE | |
| | RRGSGVKQTLNFDLLKLAGDVESNPGPGKPIPNP | |
| | LLGLDST | |
| (BimBH3.F2A)\hat{ }10_cV5, | MDMRPEIWIAQELRRIGDEFNAYYARRGSGVK | 161 |
| (BimBH3.F2A)\hat{ }10_cV5_DX | QTLNFDLLKLAGDVESNPGPDMRPEIWIAQELR | |
| | RIGDEFNAYYARRGSGVKQTLNFDLLKLAGDVES | |
| | NPGPDMRPEIWIAQELRRIGDEFNAYYARRGSG | |
| | VKQTLNFDLLKLAGDVESNPGPDMRPEIWIAQE | |
| | LRRIGDEFNAYYARRGSGVKQTLNFDLLKLAGDV | |
| | ESNPGPDMRPEIWIAQELRRIGDEFNAYYARRG | |
| | SGVKQTLNFDLLKLAGDVESNPGPDMRPEIWIA | |
| | QELRRIGDEFNAYYARRGSGVKQTLNFDLLKLAG | |
| | DVESNPGPDMRPEIWIAQELRRIGDEFNAYYAR | |
| | RGSGVKQTLNFDLLKLAGDVESNPGPDMRPEIW | |
| | IAQELRRIGDEFNAYYARRGSGVKQTLNFDLLKLA | |
| | GDVESNPGPDMRPEIWIAQELRRIGDEFNAYYAR | |
| | RGSGVKQTLNFDLLKLAGDVESNPGPDMRPEIW | |
| | IAQELRRIGDEFNAYYARRGSGVKQTLNFDLLKLA | |
| | GDVESNPGPGKPIPNPLLGLDST | |
| (Puma-P2A-BimBH3-F2A)\hat{ }3_cV5 | MEEQWAREIGAQLRRMADDLNAQYERRGSGVK | 162 |
| | QTLNFDLLKLAGDVESNPGPDMRPEIWIAQELRR | |
| | IGDEFNAYYARRGSGVKQTLNFDLLKLAGDVESN | |
| | PGPEEQWAREIGAQLRRMADDLNAQYERRGSG | |
| | VKQTLNFDLLKLAGDVESNPGPDMRPEIWIAQEL | |
| | RRIGDEFNAYYARRGSGVKQTLNFDLLKLAGDVE | |
| | SNPGPEEQWAREIGAQLRRMADDLNAQYERRG | |
| | SGVKQTLNFDLLKLAGDVESNPGPDMRPEIWIAQ | |
| | ELRRIGDEFNAYYARRGSGVKQTLNFDLLKLAGDV | |
| | ESNPGPGKPIPNPLLGLDST | |
| (Puma-F2A-BimBH3- | MEEQWAREIGAQLRRMADDLNAQYERRGSGVK | 163 |
| F2A)\hat{ }5_cV5, (Puma-F2A- | QTLNFDLLKLAGDVESNPGPDMRPEIWIAQELRR | |
| BimBH3F2A)\hat{ }5_cV5_DX | IGDEFNAYYARRGSGVKQTLNFDLLKLAGDVESN | |
| | PGPEEQWAREIGAQLRRMADDLNAQYERRGSG | |
| | VKQTLNFDLLKLAGDVESNPGPDMRPEIWIAQEL | |
| | RRIGDEFNAYYARRGSGVKQTLNFDLLKLAGDVE | |
| | SNPGPEEQWAREIGAQLRRMADDLNAQYERRG | |
| | SGVKQTLNFDLLKLAGDVESNPGPDMRPEIWIAQ | |
| | ELRRIGDEFNAYYARRGSGVKQTLNFDLLKLAGDV | |
| | ESNPGPEEQWAREIGAQLRRMADDLNAQYERR | |
| | GSGVKQTLNFDLLKLAGDVESNPGPDMRPEIWIA | |
| | QELRRIGDEFNAYYARRGSGVKQTLNFDLLKLAG | |
| | DVESNPGPEEQWAREIGAQLRRMADDLNAQYE | |
| | RRGSGVKQTLNFDLLKLAGDVESNPGPDMRPEI | |
| | WIAQELRRIGDEFNAYYARRGSGVKQTLNFDLLKL | |
| | AGDVESNPGPGKPIPNPLLGLDST | |
| (Puma-F2A-BimBH3- | MEEQWAREIGAQLRRMADDLNAQYERRGSGV | 164 |
| F2A)\hat{ }10_cV5 | KQTLNFDLLKLAGDVESNPGPDMRPEIWIAQEL | |
| | RRIGDEFNAYYARRGSGVKQTLNFDLLKLAGDVE | |
| | SNPGPEEQWAREIGAQLRRMADDLNAQYERRG | |
| | SGVKQTLNFDLLKLAGDVESNPGPDMRPEIWIA | |
| | QELRRIGDEFNAYYARRGSGVKQTLNFDLLKLAG | |
| | DVESNPGPEEQWAREIGAQLRRMADDLNAQYE | |
| | RRGSGVKQTLNFDLLKLAGDVESNPGPDMRPEI | |
| | WIAQELRRIGDEFNAYYARRGSGVKQTLNFDLLK | |
| | LAGDVESNPGPEEQWAREIGAQLRRMADDLNA | |
| | QYERRGSGVKQTLNFDLLKLAGDVESNPGPDMR | |
| | PEIWIAQELRRIGDEFNAYYARRGSGVKQTLNFDL | |
| | LKLAGDVESNPGPEEQWAREIGAQLRRMADDLN | |
| | AQYERRGSGVKQTLNFDLLKLAGDVESNPGPDM | |
| | RPEIWIAQELRRIGDEFNAYYARRGSGVKQTLNF | |
| | DLLKLAGDVESNPGPEEQWAREIGAQLRRMAD | |
| | DLNAQYERRGSGVKQTLNFDLLKLAGDVESNPG | |
| | PDMRPEIWIAQELRRIGDEFNAYYARRGSGVKQT | |
| | LNFDLLKLAGDVESNPGPEEQWAREIGAQLRRM | |
| | ADDLNAQYERRGSGVKQTLNFDLLKLAGDVESN | |
| | PGPDMRPEIWIAQELRRIGDEFNAYYARRGSGV | |
| | KQTLNFDLLKLAGDVESNPGPEEQWAREIGAQL | |
| | RRMADDLNAQYERRGSGVKQTLNFDLLKLAGD | |
| | VESNPGPDMRPEIWIAQELRRIGDEFNAYYARR | |
| | GSGVKQTLNFDLLKLAGDVESNPGPEEQWAREI | |
| | GAQLRRMADDLNAQYERRGSGVKQTLNFDLLK | |
| | LAGDVESNPGPDMRPEIWIAQELRRIGDEFNAY | |
| | YARRGSGVKQTLNFDLLKLAGDVESNPGPEEQW | |
| | AREIGAQLRRMADDLNAQYERRGSGVKQTLNF | |
| | DLLKLAGDVESNPGPDMRPEIWIAQELRRIGDE | |
| | FNAYYARRGSGVKQTLNFDLLKLAGDVESNPGP | |
| | GKPIPNPLLGLDST | |
| (SuperPumaBH3.F2A)\hat{ }10_cV5, | MQWAREIGAQLRRIGDDLNAQYERRRQGSGVK | 165 |
| (SuperPumaBH3.F2A)\hat{ }10_cV5_ | QTLNFDLLKLAGDVESNPGPQWAREIGAQLRRIG | |
| DX | DDLNAQYERRRQGSGVKQTLNFDLLKLAGDVES | |
| | NPGPQWAREIGAQLRRIGDDLNAQYERRRQGS | |
| | GVKQTLNFDLLKLAGDVESNPGPQWAREIGAQ | |
| | LRRIGDDLNAQYERRRQGSGVKQTLNFDLLKLA | |
| | GDVESNPGPQWAREIGAQLRRIGDDLNAQYER | |
| | RRQGSGVKQTLNFDLLKLAGDVESNPGPCIWAR | |
| | EIGAQLRRIGDDLNAQYERRRQGSGVKQTLNFD | |
| | LLKLAGDVESNPGPQWAREIGAQLRRIGDDLNA | |
| | QYERRRQGSGVKQTLNFDLLKLAGDVESNPGPQ | |
| | WAREIGAQLRRIGDDLNAQYERRRQGSGVKQTL | |
| | NFDLLKLAGDVESNPGPQWAREIGAQLRRIGDD | |
| | LNAQYERRRQGSGVKQTLNFDLLKLAGDVESNP | |
| | GPQWAREIGAQLRRIGDDLNAQYERRRQGSGV | |
| | KQTLNFDLLKLAGDVESNPGPGKPIPNPLLGLDST | |
| (KittyCatBH3.F2A)\hat{ }10_cV5, | MQWAREIGAQERREADDENAQYERRRQGSGV | 166 |
| (KittyCatBH3.F2A)\hat{ }10_cV5_DX | KQTLNFDLLKLAGDVESNPGPQWAREIGAQERR | |
| | EADDENAQYERRRQGSGVKQTLNFDLLKLAGDV | |
| | ESNPGPQWAREIGAQERREADDENAQYERRRQ | |
| | GSGVKQTLNFDLLKLAGDVESNPGPQWAREIGA | |
| | QERREADDENAQYERRRQGSGVKQTLNFDLLKL | |
| | AGDVESNPGPQWAREIGAQERREADDENAQYE | |
| | RRRQGSGVKQTLNFDLLKLAGDVESNPGPCIWA | |
| | REIGAQERREADDENAQYERRRQGSGVKQTLNF | |
| | DLLKLAGDVESNPGPQWAREIGAQERREADDEN | |
| | AQYERRRQGSGVKQTLNFDLLKLAGDVESNPGP | |
| | QWAREIGAQERREADDENAQYERRRQGSGVKQ | |
| | TLNFDLLKLAGDVESNPGPQWAREIGAQERREA | |
| | DDENAQYERRRQGSGVKQTLNFDLLKLAGDVES | |
| | NPGPQWAREIGAQERREADDENAQYERRRQGS | |
| | GVKQTLNFDLLKLAGDVESNPGPQWAREIGAQE | |
| | RREADDENAQYERRRQGSGVKQTLNFDLLKLAG | |
| | DVESNPGPGKPIPNPLLGLDST | |
| (KittyCatBH3.F2A)\hat{ }10_cV5, | MQWAREIGAQERREADDENAQYERRRQGSGV | 167 |
| (KittyCatBH3.F2A)\hat{ }10_cV5_DX | KQTLNFDLLKLAGDVESNPGPQWAREIGAQERR | |
| | EADDENAQYERRRQGSGVKQTLNFDLLKLAGDV | |
| | ESNPGPQWAREIGAQERREADDENAQYERRRQ | |
| | GSGVKQTLNFDLLKLAGDVESNPGPQWAREIGA | |
| | QERREADDENAQYERRRQGSGVKQTLNFDLLKL | |
| | AGDVESNPGPQWAREIGAQERREADDENAQYE | |
| | RRRQGSGVKQTLNFDLLKLAGDVESNPGPCIWA | |
| | REIGAQERREADDENAQYERRRQGSGVKQTLNF | |
| | DLLKLAGDVESNPGPQWAREIGAQERREADDE | |
| | NAQYERRRQGSGVKQTLNFDLLKLAGDVESNPG | |
| | PQWAREIGAQERREADDENAQYERRRQGSGVK | |
| | QTLNFDLLKLAGDVESNPGPQWAREIGAQERRE | |
| | ADDENAQYERRRQGSGVKQTLNFDLLKLAGDVE | |
| | SNPGPQWAREIGAQERREADDENAQYERRRQG | |
| | SGVKQTLNFDLLKLAGDVESNPGPQWAREIGAQ | |
| | ERREADDENAQYERRRQGSGVKQTLNFDLLKLA | |
| | GDVESNPGPGKPIPNPLLGLDST | |
| (NoxaBH3.F2A)\hat{ }5_cV5, | MPAELEVECATQLRRFGDKLNFRQKLLGSGVKQT | 168 |
| (NoxaBH3.F2A)\hat{ }5_cV5_DX | LNFDLLKLAGDVESNPGPPAELEVECATQLRRFG | |
| | DKLNFRQKLLGSGVKQTLNFDLLKLAGDVESNPG | |
| | PPAELEVECATQLRRFGDKLNFRQKLLGSGVKQTL | |
| | NFDLLKLAGDVESNPGPPAELEVECATQLRRFGD | |
| | KLNFRQKLLGSGVKQTLNFDLLKLAGDVESNPGP | |
| | PAELEVECATQLRRFGDKLNFRQKLLGSGVKQTL | |
| | NFDLLKLAGDVESNPGPPAELEVECATQLRRFGD | |
| | KLNFRQKLLGSGVKQTLNFDLLKLAGDVESNPGP | |
| | GKPIPNPLLGLDST | |
| (NoxaBH3.F2A)\hat{ }10_cV5, | MPAELEVECATQLRRFGDKLNFRQKLLGSGVKQT | 169 |
| (NoxaBH3.F2A)\hat{ }10_cV5_DX | LNFDLLKLAGDVESNPGPPAELEVECATQLRRFG | |
| | DKLNFRQKLLGSGVKQTLNFDLLKLAGDVESNPG | |
| | PPAELEVECATQLRRFGDKLNFRQKLLGSGVKQTL | |
| | NFDLLKLAGDVESNPGPPAELEVECATQLRRFGD | |
| | KLNFRQKLLGSGVKQTLNFDLLKLAGDVESNPGP | |
| | PAELEVECATQLRRFGDKLNFRQKLLGSGVKQTL | |
| | NFDLLKLAGDVESNPGPPAELEVECATQLRRFGD | |
| | KLNFRQKLLGSGVKQTLNFDLLKLAGDVESNPGP | |
| | PAELEVECATQLRRFGDKLNFRQKLLGSGVKQTL | |
| | NFDLLKLAGDVESNPGPPAELEVECATQLRRFGD | |
| | KLNFRQKLLGSGVKQTLNFDLLKLAGDVESNPGP | |
| | PAELEVECATQLRRFGDKLNFRQKLLGSGVKQTL | |
| | NFDLLKLAGDVESNPGPPAELEVECATQLRRFGD | |
| | KLNFRQKLLGSGVKQTLNFDLLKLAGDVESNPGP | |
| | PAELEVECATQLRRFGDKLNFRQKLLGSGVKQTL | |
| | NFDLLKLAGDVESNPGPGKPIPNPLLGLDST | |
| (BadBH3.F2A)\hat{ }10_cV5, | MNLWAAQRYGRELRRMSDEFVDSFKKGGSGVK | 170 |
| (BadBH3.F2A)\hat{ }10_cV5_DX | QTLNFDLLKLAGDVESNPGPNLWAAQRYGRELR | |
| | RMSDEFVDSFKKGGSGVKQTLNFDLLKLAGDVES | |
| | NPGPNLWAAQRYGRELRRMSDEFVDSFKKGGS | |
| | GVKQTLNFDLLKLAGDVESNPGPNLWAAQRYGR | |
| | ELRRMSDEFVDSFKKGGSGVKQTLNFDLLKLAGD | |
| | VESNPGPNLWAAQRYGRELRRMSDEFVDSFKKG | |
| | GSGVKQTLNFDLLKLAGDVESNPGPNLWAAQRY | |
| | GRELRRMSDEFVDSFKKGGSGVKQTLNFDLLKLA | |
| | GDVESNPGPNLWAAQRYGRELRRMSDEFVDSFK | |
| | KGGSGVKQTLNFDLLKLAGDVESNPGPNLWAAQ | |
| | RYGRELRRMSDEFVDSFKKGGSGVKQTLNFDLLK | |
| | LAGDVESNPGPNLWAAQRYGRELRRMSDEFVDS | |
| | FKKGGSGVKQTLNFDLLKLAGDVESNPGPNLWA | |
| | AQRYGRELRRMSDEFVDSFKKGGSGVKQTLNFD | |
| | LLKLAGDVESNPGPGKPIPNPLLGLDST | |
| (Noxa-F2A-BadBH3-F2A)\hat{ }5_cV5, | MPAELEVECATQLRRFGDKLNFRQKLLGSGVKQT | 171 |
| (Noxa-F2A-BadBH3- | LNFDLLKLAGDVESNPGPNLWAAQRYGRELRRM | |
| F2A)\hat{ }5_cV5_DX | SDEFVDSFKKGGSGVKQTLNFDLLKLAGDVESNP | |
| | GPPAELEVECATQLRRFGDKLNFRQKLLGSGVKQ | |
| | TLNFDLLKLAGDVESNPGPNLWAAQRYGRELRR | |
| | MSDEFVDSFKKGGSGVKQTLNFDLLKLAGDVESN | |
| | PGPPAELEVECATQLRRFGDKLNFRQKLLGSGVK | |
| | QTLNFDLLKLAGDVESNPGPNLWAAQRYGRELR | |
| | RMSDEFVDSFKKGGSGVKQTLNFDLLKLAGDVES | |
| | NPGPPAELEVECATQLRRFGDKLNFRQKLLGSGV | |
| | KQTLNFDLLKLAGDVESNPGPNLWAAQRYGREL | |
| | RRMSDEFVDSFKKGGSGVKQTLNFDLLKLAGDVE | |
| | SNPGPPAELEVECATQLRRFGDKLNFRQKLLGSG | |
| | VKQTLNFDLLKLAGDVESNPGPNLWAAQRYGRE | |
| | LRRMSDEFVDSFKKGGSGVKQTLNFDLLKLAGDV | |
| | ESNPGPGKPIPNPLLGLDST | |
| (Noxa-F2A-BadBH3- | MPAELEVECATQLRRFGDKLNFRQKLLGSGVKQ | 172 |
| F2A)\hat{ }10_cV5 | TLNFDLLKLAGDVESNPGPNLWAAQRYGRELRR | |
| | MSDEFVDSFKKGGSGVKQTLNFDLLKLAGDVES | |
| | NPGPPAELEVECATQLRRFGDKLNFRQKLLGSG | |
| | VKQTLNFDLLKLAGDVESNPGPNLWAAQRYGR | |
| | ELRRMSDEFVDSFKKGGSGVKQTLNFDLLKLAG | |
| | DVESNPGPPAELEVECATQLRRFGDKLNFRQKLL | |
| | GSGVKQTLNFDLLKLAGDVESNPGPNLWAAQR | |
| | YGRELRRMSDEFVDSFKKGGSGVKQTLNFDLLKL | |
| | AGDVESNPGPPAELEVECATQLRRFGDKLNFRQ | |
| | KLLGSGVKQTLNFDLLKLAGDVESNPGPNLWAA | |
| | QRYGRELRRMSDEFVDSFKKGGSGVKQTLNFDL | |
| | LKLAGDVESNPGPPAELEVECATQLRRFGDKLNF | |
| | RQKLLGSGVKQTLNFDLLKLAGDVESNPGPNLW | |
| | AAQRYGRELRRMSDEFVDSFKKGGSGVKQTLNF | |
| | DLLKLAGDVESNPGPPAELEVECATQLRRFGDKL | |
| | NFRQKLLGSGVKQTLNFDLLKLAGDVESNPGPNL | |
| | WAAQRYGRELRRMSDEFVDSFKKGGSGVKQTLN | |
| | FDLLKLAGDVESNPGPPAELEVECATQLRRFGDKL | |
| | NFRQKLLGSGVKQTLNFDLLKLAGDVESNPGPNL | |
| | WAAQRYGRELRRMSDEFVDSFKKGGSGVKQTL | |
| | NFDLLKLAGDVESNPGPPAELEVECATQLRRFGD | |
| | KLNFRQKLLGSGVKQTLNFDLLKLAGDVESNPGP | |
| | NLWAAQRYGRELRRMSDEFVDSFKKGGSGVKQ | |
| | TLNFDLLKLAGDVESNPGPPAELEVECATQLRRF | |
| | GDKLNFRQKLLGSGVKQTLNFDLLKLAGDVESN | |
| | PGPNLWAAQRYGRELRRMSDEFVDSFKKGGSG | |
| | VKQTLNFDLLKLAGDVESNPGPPAELEVECATQL | |
| | RRFGDKLNFRQKLLGSGVKQTLNFDLLKLAGDVE | |
| | SNPGPNLWAAQRYGRELRRMSDEFVDSFKKGG | |
| | SGVKQTLNFDLLKLAGDVESNPGPGKPIPNPLLGL | |
| | DST | |
| (Puma-F2A-BimBH3- | MEEQWAREIGAQLRRMADDLNAQYERRGSGVK | 173 |
| F2A)\hat{ }3_cV5_DX | QTLNFDLLKLAGDVESNPGPDMRPEIWIAQELRR | |
| | IGDEFNAYYARRGSGVKQTLNFDLLKLAGDVESN | |
| | PGPEEQWAREIGAQLRRMADDLNAQYERRGSG | |
| | VKQTLNFDLLKLAGDVESNPGPDMRPEIWIAQEL | |
| | RRIGDEFNAYYARRGSGVKQTLNFDLLKLAGDVE | |
| | SNPGPEEQWAREIGAQLRRMADDLNAQYERRG | |
| | SGVKQTLNFDLLKLAGDVESNPGPDMRPEIWIAQ | |
| | ELRRIGDEFNAYYARRGSGVKQTLNFDLLKLAGDV | |
| | ESNPGPGKPIPNPLLGLDST | |
| (SuperPumaBH3.F2A)\hat{ }3_cV5_ | MQWAREIGAQLRRIGDDLNAQYERRRQGSGVK | 174 |
| DNA2.0 | QTLNFDLLKLAGDVESNPGPQWAREIGAQLRRIG | |
| | DDLNAQYERRRQGSGVKQTLNFDLLKLAGDVES | |
| | NPGPQWAREIGAQLRRIGDDLNAQYERRRQGSG | |
| | VKQTLNFDLLKLAGDVESNPGPGSGVKQTLNFDL | |
| | LKLAGDVESNPGPGKPIPNPLLGLDST | |
| (Puma-F2A-BimBH3- | MEEQWAREIGAQLRRMADDLNAQYERRGSGVK | 175 |
| F2A)\hat{ }3_cV5_DX_DNA2.0 | QTLNFDLLKLAGDVESNPGPDMRPEIWIAQELRR | |
| | IGDEFNAYYARRGSGVKQTLNFDLLKLAGDVESN | |
| | PGPEEQWAREIGAQLRRMADDLNAQYERRGSG | |
| | VKQTLNFDLLKLAGDVESNPGPDMRPEIWIAQEL | |
| | RRIGDEFNAYYARRGSGVKQTLNFDLLKLAGDVE | |
| | SNPGPEEQWAREIGAQLRRMADDLNAQYERRG | |
| | SGVKQTLNFDLLKLAGDVESNPGPDMRPEIWIAQ | |
| | ELRRIGDEFNAYYARRGSGVKQTLNFDLLKLAGDV | |
| | ESNPGPGKPIPNPLLGLDST | |
| (SuperPumaBH3.F2A)\hat{ }5_cV5_ | MQWAREIGAQLRRIGDDLNAQYERRRQGSGVK | 176 |
| DNA2.0 | QTLNFDLLKLAGDVESNPGPQWAREIGAQLRRIG | |
| | DDLNAQYERRRQGSGVKQTLNFDLLKLAGDVES | |
| | NPGPQWAREIGAQLRRIGDDLNAQYERRRQGSG | |
| | VKQTLNFDLLKLAGDVESNPGPQWAREIGAQLR | |
| | RIGDDLNAQYERRRQGSGVKQTLNFDLLKLAGDV | |
| | ESNPGPQWAREIGAQLRRIGDDLNAQYERRRQG | |
| | SGVKQTLNFDLLKLAGDVESNPGPGKPIPNPLLGL | |
| | DST | |
| (pumaBH3.F2A)\hat{ }5_cV5_DNA2.0 | MEEQWAREIGAQLRRMADDLNAQYERRGSGVK | 177 |
| | QTLNFDLLKLAGDVESNPGPEEQWAREIGAQLRR | |
| | MADDLNAQYERRGSGVKQTLNFDLLKLAGDVES | |
| | NPGPEEQWAREIGAQLRRMADDLNAQYERRGS | |
| | GVKQTLNFDLLKLAGDVESNPGPEEQWAREIGA | |
| | QLRRMADDLNAQYERRGSGVKQTLNFDLLKLAG | |
| | DVESNPGPEEQWAREIGAQLRRMADDLNAQYE | |
| | RRGSGVKQTLNFDLLKLAGDVESNPGPGKPIPNP | |
| | LLGLDST | |
| (KittyCatBH3.F2A)\hat{ }5_cV5_DNA2. | MQWAREIGAQERREADDENAQYERRRQGSGV | 178 |
| 0 | KQTLNFDLLKLAGDVESNPGPQWAREIGAQERR | |
| | EADDENAQYERRRQGSGVKQTLNFDLLKLAGDV | |
| | ESNPGPQWAREIGAQERREADDENAQYERRRQ | |
| | GSGVKQTLNFDLLKLAGDVESNPGPQWAREIGA | |
| | QERREADDENAQYERRRQGSGVKQTLNFDLLKL | |
| | AGDVESNPGPQWAREIGAQERREADDENAQYE | |
| | RRRQGSGVKQTLNFDLLKLAGDVESNPGPGKPIP | |
| | NPLLGLDST | |
| (KittyCatBH3.F2A)\hat{ }10_cV5_DNA | MQWAREIGAQERREADDENAQYERRRQGSGV | 179 |
| 2.0 | KQTLNFDLLKLAGDVESNPGPQWAREIGAQERR | |
| | EADDENAQYERRRQGSGVKQTLNFDLLKLAGDV | |
| | ESNPGPQWAREIGAQERREADDENAQYERRRQ | |
| | GSGVKQTLNFDLLKLAGDVESNPGPQWAREIGA | |
| | QERREADDENAQYERRRQGSGVKQTLNFDLLKL | |
| | AGDVESNPGPQWAREIGAQERREADDENAQYE | |
| | RRRQGSGVKQTLNFDLLKLAGDVESNPGPQWA | |
| | REIGAQERREADDENAQYERRRQGSGVKQTLNF | |
| | DLLKLAGDVESNPGPQWAREIGAQERREADDE | |
| | NAQYERRRQGSGVKQTLNFDLLKLAGDVESNPG | |
| | PQWAREIGAQERREADDENAQYERRRQGSGVK | |
| | QTLNFDLLKLAGDVESNPGPQWAREIGAQERRE | |
| | ADDENAQYERRRQGSGVKQTLNFDLLKLAGDVE | |
| | SNPGPQWAREIGAQERREADDENAQYERRRQG | |
| | SGVKQTLNFDLLKLAGDVESNPGPQWAREIGAQ | |
| | ERREADDENAQYERRRQGSGVKQTLNFDLLKLA | |
| | GDVESNPGPGKPIPNPLLGLDST | |
| (pumaBH3.F2A)\hat{ }10_cV5_DNA2. | MEEQWAREIGAQLRRMADDLNAQYERRGSGVK | 180 |
| 0 | QTLNFDLLKLAGDVESNPGPEEQWAREIGAQLRR | |
| | MADDLNAQYERRGSGVKQTLNFDLLKLAGDVES | |
| | NPGPEEQWAREIGAQLRRMADDLNAQYERRGS | |
| | GVKQTLNFDLLKLAGDVESNPGPEEQWAREIGA | |
| | QLRRMADDLNAQYERRGSGVKQTLNFDLLKLAG | |
| | DVESNPGPEEQWAREIGAQLRRMADDLNAQYE | |
| | RRGSGVKQTLNFDLLKLAGDVESNPGPEEQWAR | |
| | EIGAQLRRMADDLNAQYERRGSGVKQTLNFDLL | |
| | KLAGDVESNPGPEEQWAREIGAQLRRMADDLN | |
| | AQYERRGSGVKQTLNFDLLKLAGDVESNPGPEEQ | |
| | WAREIGAQLRRMADDLNAQYERRGSGVKQTLN | |
| | FDLLKLAGDVESNPGPEEQWAREIGAQLRRMAD | |
| | DLNAQYERRGSGVKQTLNFDLLKLAGDVESNPGP | |
| | EEQWAREIGAQLRRMADDLNAQYERRGSGVKQ | |
| | TLNFDLLKLAGDVESNPGPGKPIPNPLLGLDST | |
| (Puma-F2A-BimBH3- | MEEQWAREIGAQLRRMADDLNAQYERRGSGVK | 181 |
| F2A)\hat{ }5_cV5_DNA2.0 | QTLNFDLLKLAGDVESNPGPDMRPEIWIAQELRR | |
| | IGDEFNAYYARRGSGVKQTLNFDLLKLAGDVESN | |
| | PGPEEQWAREIGAQLRRMADDLNAQYERRGSG | |
| | VKQTLNFDLLKLAGDVESNPGPDMRPEIWIAQEL | |
| | RRIGDEFNAYYARRGSGVKQTLNFDLLKLAGDVE | |
| | SNPGPEEQWAREIGAQLRRMADDLNAQYERRG | |
| | SGVKQTLNFDLLKLAGDVESNPGPDMRPEIWIAQ | |
| | ELRRIGDEFNAYYARRGSGVKQTLNFDLLKLAGDV | |
| | ESNPGPEEQWAREIGAQLRRMADDLNAQYERR | |
| | GSGVKQTLNFDLLKLAGDVESNPGPDMRPEIWIA | |
| | QELRRIGDEFNAYYARRGSGVKQTLNFDLLKLAG | |
| | DVESNPGPEEQWAREIGAQLRRMADDLNAQYE | |
| | RRGSGVKQTLNFDLLKLAGDVESNPGPDMRPEI | |
| | WIAQELRRIGDEFNAYYARRGSGVKQTLNFDLLKL | |
| | AGDVESNPGPGKPIPNPLLGLDST | |
| (SuperPumaBH3.F2A)\hat{ }10_cV5_ | MQWAREIGAQLRRIGDDLNAQYERRRQGSGV | 182 |
| DNA2.0 | KQTLNFDLLKLAGDVESNPGPQWAREIGAQLR | |
| | RIGDDLNAQYERRRQGSGVKQTLNFDLLKLAG | |
| | DVESNPGPQWAREIGAQLRRIGDDLNAQYERR | |
| | RQGSGVKQTLNFDLLKLAGDVESNPGPQWAR | |
| | EIGAQLRRIGDDLNAQYERRRQGSGVKQTLNF | |
| | DLLKLAGDVESNPGPQWAREIGAQLRRIGDDL | |
| | NAQYERRRQGSGVKQTLNFDLLKLAGDVESNP | |
| | GPQWAREIGAQLRRIGDDLNAQYERRRQGSG | |
| | VKQTLNFDLLKLAGDVESNPGPQWAREIGAQL | |
| | RRIGDDLNAQYERRRQGSGVKQTLNFDLLKLA | |
| | GDVESNPGPQWAREIGAQLRRIGDDLNAQYE | |
| | RRRQGSGVKQTLNFDLLKLAGDVESNPGPOW | |
| | AREIGAQLRRIGDDLNAQYERRRQGSGVKQTL | |
| | NFDLLKLAGDVESNPGPQWAREIGAQLRRIGD | |
| | DLNAQYERRRQGSGVKQTLNFDLLKLAGDVES | |
| | NPGPGKPIPNPLLGLDST | |
| (KittyCatBH3.F2A)\hat{ }3_cV5 | MQWAREIGAQERREADDENAQYERRRQGSGVK | 183 |
| | QTLNFDLLKLAGDVESNPGPQWAREIGAQERRE | |
| | ADDENAQYERRRQGSGVKQTLNFDLLKLAGDVE | |
| | SNPGPQWAREIGAQERREADDENAQYERRRQG | |
| | SGVKQTLNFDLLKLAGDVESNPGPGKPIPNPLLGL | |
| | DST | |
| (KittyCatBH3.P2A)\hat{ }3_cV5 | MQWAREIGAQERREADDENAQYERRRQGSGAT | 184 |
| | NFSLLKQAGDVEENPGPQWAREIGAQERREADD | |
| | ENAQYERRRQGSGATNFSLLKQAGDVEENPGPQ | |
| | WAREIGAQERREADDENAQYERRRQGSGVKQTL | |
| | NFDLLKLAGDVESNPGPGKPIPNPLLGLDST | |
| PumaBH3(x3.P2A).v5_miR122 | MEEQWAREIGAQLRRMADDLNAQYERRGSGAT | 185 |
| | NFSLLKQAGDVEENPGPEEQWAREIGAQLRRMA | |
| | DDLNAQYERRGSGATNFSLLKQAGDVEENPGPE | |
| | EQWAREIGAQLRRMADDLNAQYERRGKPIPNPL | |
| | LGLDST | |
| (PUMA BH3.GGGSx3)x3.V5 | MEEQWAREIGAQLRRMADDLNAQYERRGGGS | 186 |
| | GGGSGGGSEEQWAREIGAQLRRMADDLNAQYE | |
| | RRGGGSGGGSGGGSEEQWAREIGAQLRRMADD | |
| | LNAQYERRGKPIPNPLLGLDST | |
| (PUMA BH3.GGGSx3)x3.V5_DX | MEEQWAREIGAQLRRMADDLNAQYERRGGGS | 187 |
| | GGGSGGGSEEQWAREIGAQLRRMADDLNAQYE | |
| | RRGGGSGGGSGGGSEEQWAREIGAQLRRMADD | |
| | LNAQYERRGKPIPNPLLGLDST | |
| PUMA BH3.GGGSx3.PUMA | MEEQWAREIGAQLRRMADDLNAQYERRGGGS | 188 |
| BH3.V5 | GGGSGGGSEEQWAREIGAQLRRMADDLNAQYE | |
| | RRGKPIPNPLLGLDST | |
| PumaBH3(x3.P2A).v5_miR122 | MEEQWAREIGAQLRRMADDLNAQYERRGSGAT | 189 |
| | NFSLLKQAGDVEENPGPEEQWAREIGAQLRRMA | |
| | DDLNAQYERRGSGATNFSLLKQAGDVEENPGPE | |
| | EQWAREIGAQLRRMADDLNAQYERRGKPIPNPL | |
| | LGLDST | |

[1208] The modified mRNA constructs contained a 5′ UTR having the sequence shown in SEQ ID NO: 72, a 3′ UTR having the sequence shown in SEQ ID NO: 73, contained a Cap 1 5′ Cap (7mG(5′)ppp(5′)NlmpNp), a poly A tail of 100 nucleotides and were fully modified with 1-methyl-pseudouridine (m1ψ). The open reading frame (ORF) amino acid sequence shown in Table 15 encoded by the mRNA constructs include an epitope tag sequence incorporated into the sequence. Amino acid sequences corresponding to the constructs of SEQ ID NOs: 142-189 but without the epitope tag are shown in SEQ ID NOs: 190-237. Nucleotide sequences encoding the amino acid sequences shown in SEQ ID NOs: 142-189 are shown in SEQ ID NOs: 238-285.

[1209] Expression of the polypeptides from the mRNA constructs was examined using cell free translation methods with wheat germ lysate, as follows. Wheat Germ Lysate (WGL; Promega, Cat. #L4380) was prepared according to the manufacturer's instructions by adding 28 ul of potassium acetate to 200 ul of WGL. mRNA constructs were diluted to 250 ng/ul and heat denatured at 65° C. for 3 minutes. Individual translation reactions were prepared containing 12.5 ul of prepared WGL, 2 ul methionine-free amino acid mix, 2 ul of 5 mM methionine, 2 ul of mRNA at 250 ng/ul (500 ng per reaction) and 6.5 ul sterile water for a final volume of 25 ul. Reactions were incubated at 25° C. for 120 minutes. After incubation, a portion of the reaction mixture (e.g., 8%, 20%) was mixed with LDS/DTT and loaded onto a 12% bis/tris gel. Following electrophoresis, the gel was blotted onto a 0.2 um nitrocellulose membrane using the iBlot transfer system. The membrane was blocked with 5% non-fat dry milk in PBS. The blocked membrane was then incubated with a mouse anti-V5 antibody (Life Tech 1:8K in PBS-T), which binds to the epitope tag encoded by the mRNA constructs, for 1 hour at room temperature, followed by a labeled rat anti-mouse antibody (BD, 1:100K in PBS-T) for 1 hour at room temperature.

[1210] Representative results of the cell free translation experiment are shown in FIG. 1, which demonstrate that expression of an mmRNA construct encoding 3 copies of the PUMA BH3 domain, with an F2A cleavage site in between each BH3 domain (referred to as “PumaBH3(x3.F2A).v5_Hs3UPCRfree” in Table 15 and as 183534 in FIG. 1), using the WGL in a cell free translation system led to detection of mono-, di- and trimeric BH3 domain species.

### Example 2

### Rapid Induction of Apoptosis and Cell Killing by Transfection of Hep3B Cells with mRNA Encoding Multimeric BH3 Domains

[1211] To determine whether multimeric BH3 domain constructs could induce apoptosis, Hep3B hepatocellular carcinoma cells were transfected with varying doses of a series of different mmRNA constructs encoding either 3 or 5 copies of the PUMA BH3 domain, with intervening F2A linkers between each BH3 domain. Certain multimeric BH3 domain constructs also contained a miR122 binding site or a miR142.3p binding site or both of these miR binding sites. As a positive control, an SQT-PUMA-BH3 mmRNA construct encoding a fusion polypeptide of the SQT scaffold linked to a single PUMA BH3 domain, which was known to induce apoptosis, was used. As a negative control, an “empty” SQT mmRNA construct, encoding only the SQT scaffold with no BH3 domain, was used.

[1212] 20,000 Hep3B cells/well were plated in 96 well plates and the cells were transfected with varying doses of the mmRNA constructs using Lipofectamine 2000 (Life Technologies) in the presence of YOYO-3 (Life Technologies), a DNA dye that is taken up preferentially by dead cells that is used to measure the extent of cell death. The results for apoptosis at 24 hours post-transfection are shown in the graph of FIG. 2. The results demonstrate that all mmRNA constructs encoding multimeric BH3 domains induced apoptosis of Hep3B cells, with the PUMA BH3×3 multimeric constructs (containing intervening F2A cleavage sites and either with or without miR binding sites) exhibiting similar potency to the SQT-PUMA-BH3 construct and a higher potency than the PUMA BH3×5 multimeric construct.

### Example 3

### Lipid Nanoparticle-Formulated Multimeric BH3 Constructs Induce Apoptosis in Hep3B Cells

[1213] The efficacy of mmRNA constructs encoding multimeric BH3 domains in inducing cell death was tested in the Hep3b hepatocellular carcinoma cell lines using lipid nanoparticle (LNP)-formulated constructs. Hep3B cells were treated with varying doses of MC3-formulated LNPs containing varying doses of a series of different mmRNA constructs encoding either 3 or 5 copies of the PUMA BH3 domain, with intervening F2A linkers between each BH3 domain. As a positive control, LNPs containing an SQT-PUMA-BH3 mmRNA construct, encoding a fusion polypeptide of the SQT scaffold linked to a single PUMA BH3 domain, which was known to induce apoptosis, was used. As a negative control, LNPs containing an “empty” SQT mmRNA construct, encoding only the SQT scaffold with no BH3 domain, was used.

[1214] 20,000 Hep3B cells/well were plated in 96 well plates and the cells were treated with varying doses of the LNPs containing the mmRNA constructs. Cell death was measured by Essen Caspase 3/7 reagent staining (total integrated intensity apoptosis) after 12 or 24 hours. The results of these experiments are shown in FIGS. 3A (12 hours) and 3B (24 hours). Cell death also was measured using CellTiterGlo (CTG) assay at 24 hours (FIG. 3C). The results demonstrate that LNPs containing the mmRNA constructs encoding multimeric BH3 domains induced apoptosis of Hep3B cells, with the PUMA BH3×3 multimeric construct exhibiting similar potency to the SQT-PUMA-BH3 construct and a higher potency than the PUMA BH3×5 multimeric construct.

### Example 4

### Rapid Induction of Apoptosis and Cell Killing by Transfection of Hep3B Cells with mRNA Encoding Truncated Bid Containing a BH3 Domain

[1215] To determine whether truncated BID constructs containing a BH3 domain could induce apoptosis, Hep3B hepatocellular carcinoma cells were transfected with varying doses of truncated BID (tBID) BH3 domain-containing mmRNA constructs. One construct encoded a single copy of amino acids 61-195 of the BID protein that includes its BH3 domain (with a FLAG epitope tag). The open reading frame (ORF) amino acid sequence and corresponding nucleotide sequence encoding the ORF a.a. sequence are shown in SEQ ID NOs: 289 and 290, respectively. The sequence for the corresponding construct without the FLAG epitope tag is shown in SEQ ID NO: 291. A second construct encoded a single copy of amino acids 77-195 of the BID protein that includes its BH3 domain (with a FLAG epitope tag). The open reading frame (ORF) amino acid sequence and corresponding nucleotide sequence encoding the ORF a.a. sequence are shown in SEQ ID NOs: 292 and 293, respectively. The sequence for the corresponding construct without the FLAG epitope tag is shown in SEQ ID NO: 294. The open reading frame (ORF) amino acid sequence and corresponding nucleotide sequence encoding the ORF a.a. sequence of a third construct, containing amino acids 61-104 of the BID protein, are shown in SEQ ID NOs: 286 and 287, respectively. The sequence for the corresponding construct without the FLAG epitope tag is shown in SEQ ID NO: 288.

[1216] As a positive control, an SQT-PUMA-BH3 mmRNA construct encoding a fusion polypeptide of the SQT scaffold linked to a single PUMA BH3 domain, which was known to induce apoptosis, was used. As a negative control, an “empty” SQT mmRNA construct, encoding only the SQT scaffold with no BH3 domain, was used.

[1217] Hep3B cells/well were plated in 96 well plates and the cells were transfected with varying doses of the mmRNA constructs. Cell death was measured using the CellTiterGlo (CTG) assay. The results for the tBID (61-195) constructs are shown in the graph of FIG. 4 (“pl. 1, 2 and 3” refers to results from different plates). The results for the tBID (77-195) constructs are shown in the graph of FIG. 5 (“pl. 1, 2 and 3” refers to results from different plates). The results demonstrate that both of the truncated BID constructs containing its BH3 domain induced apoptosis of Hep3B cells, exhibiting a similar potency to the positive control SQT-PUMA-BH3 construct.

### Example 5

### Synergistic Pro-Apoptotic Effect of Targeting MCL1 in Combination with SQT-BH3 Constructs

[1218] In this example, the effect on apoptosis of combining SQT-BH3 mRNA constructs with mRNA constructs specifically targeting MCL1 was examined further. It previously had been observed that combining SQT-BH3 with sorafenib led to synergistic pro-apoptotic effects. Sorafenib can cause downregulation of MCL1 but also affects other pathways and thus unwanted side effects could occur through the use of sorafenib to target MCL1. Furthermore, sorafenib does not cause downregulation of MCL1 in all cell types (e.g., primary hepatocytes). Accordingly, specific anti-MCL1 inhibitors were desired. While not intending to be limited by mechanism, it is thought that by neutralizing MCL1 in tumor cells, the tumor then reverts to sole reliance on BCLXL, BCL2 and/or other prosurvival members of the family as the prosurvival mechanism/pathway. Accordingly, use of SQT-BH3 (or any mRNA construct encoding one or more BH3 domains), which specifically destroys BCLXL, BCL2 and/or prosurvival members of the family then leads to better tumor killing when used in combination with an anti-MCL1 agent.

[1219] A first series of experiments was conducted to determine whether specific targeting of MCL1 recapitulates sorafenib synergy with SQT-BH3 in cells in vitro. In these experiments, MCL1 was targeted using a commercially available siRNA (Dharmacon, ON-TARGETplus Human MCL1 (4170) siRNA-SMARTpool, #L-004501-00-0005). Western blotting experiments confirmed that treatment of Hep3B cells with this siRNA or with 10 uM sorafenib for 24 hours downregulated MCL1, whereas treatment with a non-targeting control siRNA or with PBS did not downregulate MCL1.

[1220] Next, Hep3B cells and primary hepatocytes were treated with either SQT-PUMA-BH3 or SQT-Bad-BH3 in combination with either siMCL1 or sorafenib. Controls were an empty SQT construct (“SQT-dummy”), a non-targeting siRNA and PBS. For treatment of Hep3B cells, 20,000 Hep3B cells/well per plated in 96-well plates. At Day 1, some wells were transfected with siMCL1 (Dharmacon, ON-TARGETplus Human MCL1 (4170) siRNA-SMARTpool, #L-004501-00-0005) or non-targeting siRNA (ON-TARGETplus Non-targeting Control Pool, #D-001810-10-05). At Day 3, cells were treated with the 10 uM sorafenib tosylate (Selleck Chemicals) or PBS, and transfected with SQT-dummy or SQT-PUMA or SQT-Bad. 24 hours after treatment, YOYO®-3 iodide (Life Technologies) viability dye was added to each well and cell death was measured on an IncuCyte ZOOM® using YOYO-3 fluorescence as a readout (=“Apoptosis”). For treatment of primary hepatocytes, 18,000 mouse hepatocytes (Gibco) were seeded in each well of a 96-well plate. At Day 1, some wells were transfected with siMCL1 (Dharmacon, SMARTpool: ON-TARGETplus Mcl siRNA, #L-062229-00-0005) or non-targeting siRNA (ON-TARGETplus Non-targeting Control Pool, #D-001810-10-05). At Day 3, cells were treated with the 10 uM sorafenib tosylate (Selleck Chemicals) or PBS, and transfected with SQT-dummy or SQT-PUMA or SQT-Bad. 24 hours after treatment, Caspase 3/7 reagent (EssenBio) apoptosis dye was added to each well and cell death was measured on an IncuCyte ZOOM® using the caspase 3/7 reagent fluorescence as a readout (=“Apoptosis”).

[1221] The results are shown in FIGS. 6A-D, wherein FIGS. 6A and 6C show the results for the Hep3B cells and FIGS. 6B and 6D show the results for the primary hepatocytes. FIGS. 6A and 6B show the results for treatment with SQT-PUMA-BH3. FIGS. 6C and 6D show the results for treatment with SQT-Bad-BH3. The results demonstrate that in primary hepatocytes, treatment with either SQT-PUMA-BH3 or SQT-Bad-BH3, in combination with either siMCL1, sorafenib or controls, did not lead to increased apoptosis as compared to treatment with the control SQT-dummy construct. In contrast, treatment of the Hep3B cells with either SQT-PUMA-BH3 or SQT-Bad-BH3, in combination with either siMCL1 or sorafenib, led to a marked increase in apoptosis as compared to treatment with the SQT-BH3 construct in combination with non-targeting siRNA or PBS. These results demonstrate that in the hepatocellular carcinoma cells (but not primary hepatocytes) specific targeting of MCL1 recapitulates the pro-apoptotic synergy previously observed with SQT-BH3 in combination with sorafenib.

[1222] Therefore, a series of anti-MCL1 mmRNA constructs were designed, the amino acid sequences of the open reading frames of which are shown below in Table 16:

TABLE 16

| | ORF Amino Acid | Nucleotide |
|---|---|---|
| Name | SEQ ID NO: | SEQ ID NO: |
| SQTanti-Mcl1.(nt)BimBH3.2A.v5 | 107 | 127 |
| BimBH3.2A(x3.F2A).v5_miR122 | 108 | 128 |
| SQT.(nt)Mcl1.BH3.cv5 | 109 | 129 |
| Mcl1.BH3(x3.F2A).cV5 | 110 | 130 |
| antiMcl1.MS1(x3.F2A).cV5 | 111 | 131 |
| antiMcl1.MS2(x3.F2A).cV5 | 112 | 132 |
| antiMcl1.MS3(x3.F2A).cV5 | 113 | 133 |
| antiMcl1.SB-02(x3.F2A).cV5 | 114 | 134 |
| antiMcl1.SB-03(x3.F2A).cV5 | 115 | 135 |
| antiMcl1.SB-04(x3.F2A).cV5 | 116 | 136 |

The modified mRNA constructs contained a 5′ UTR having the sequence shown in SEQ ID NO: 72, a 3′ UTR having the sequence shown in SEQ ID NO: 73, a Cap 1 5′ Cap (7mG(5′)ppp(5′)NmpNp), a poly A tail of 100 nucleotides and were fully modified with 1-methyl-pseudouridine (m1ψ). The open reading frame (ORF) amino acid sequence shown in Table 16 encoded by the mRNA constructs include an epitope tag sequence (v5) incorporated into the sequence. Sequences corresponding to SEQ ID NOs: 107-116 but without the epitope tag are shown in SEQ ID NOs: 117-126.

[1223] Anti-MCL1 mmRNA constructs were tested for synergistic killing when combined with SQT-PUMA-BH3 in Hep3B cells. 20,000 Hep3B cells were seeded per well in 96-well plates. Each well was transfected with (a) 1.6 ng SQT-empty (“SQT-dummy”) or SQT-PUMA-BH3; and (b) 50 ng or 12.5 ng anti-MCL1 mRNA. Transfections of mRNA were done with Lipofectamine 2000 (L2K). After 48 hours, apoptosis measurements performed using YOYO-3 viability dye in an Incucyte instrument.

[1224] The results are shown in FIGS. 7A-B. FIG. 7A shows the results for treatment with 50 ng anti-MCL1 mRNA; FIG. 7B shows the results for treatment with 12.5 ng anti-MCL1 mRNA. The results demonstrate that at the 50 ng dosage, all anti-MCL1 constructs tested demonstrated a synergistic anti-apoptotic effect in combination with SQT-PUMA-BH3, as compared to treatment with SQT-PUMA-BH3 alone.

### Example 6

### Evaluation of PEG-Lipid Ratios in Lipid Nanoparticles

[1225] Optimal molar percentages of PEG-Lipids for in vivo targeted delivery of lipid nanoparticles (LNPs) to tumors were evaluated by varying the molar percentages of different PEG-Lipids in LNPs and testing their physicochemical properties in the CT-26 and Hep3B mouse tumor models.

### Preparation and Characterization of PEG-Lipid LNPs

[1226] Lipid nanoparticle formulations were prepared that were composed of: (i) 50 mol % DLin-KC2-DMA (cationic lipid or ionizable amino lipid); (ii) 10 mol % DODMA-DSPC (non-cationic lipid); (iii) 30-39.5 mol % Cholesterol; and (iv) 0.5-10 mol % PEG-Lipid. The total percentage of Cholesterol+PEG-Lipid=40 mol %. Thus, when the PEG-Lipid was present at 0.5 mol %, the Cholesterol was present at 39.5 mol %, when the PEG-Lipid was present at 1.5 mol %, the Cholesterol was present at 38.5 mol %, when the PEG-Lipid was present at 5 mol %, the Cholesterol was present at 35 mol % and when the PEG-Lipid was present at 10 mol %, the Cholesterol was present at 30 mol %.

[1227] Three forms of PEG-Lipid were tested: PEG-DMG, PEG-DSG and PEG-DSPE. PEG-DMG and PEG-DSG have the following structure:

[chemical structure]

wherein for DMG: R1, R2=C14 and for DSG: R1, R2=C18.
PEG-DSPE has the following structure:

[chemical structure]

wherein for DSPE: R1, R2=C18.

[1228] The PEG-Lipids having longer R1, R2 lipid chains (e.g., DSG and DSPE) are less diffusible than PEG-Lipids having shorter R1, R2 lipid chains (e.g., DMG).

[1229] The physiochemical properties of the LNPs containing different percentages of the three different PEG-Lipids was examined, the results of which are shown below in Tables 17-20 below.

TABLE 17

| | Z-Average (diameter in nm) | | | |
|---|---|---|---|---|
| | 0.5 mol % | 1.5 mol % | 5 mol % | 10 mol % |
| PEG-DMG | 184.3 | 77.03 | 62.2 | 53.49 |
| PEG-DSG | 190.9 | 82.52 | 65.64 | 49.81 |
| PEG-DSPE | 179.9 | 84.58 | 58.74 | 47.4 |

[1230] These results demonstrate that the 0.5 mol % PEG-containing LNPs were larger than those with a higher mol % PEG-Lipid concentration.

TABLE 18

| | Polydispersity Index (PDI) | | | |
|---|---|---|---|---|
| | 0.5 mol % | 1.5 mol % | 5 mol % | 10 mol % |
| PEG-DMG | 0.069 | 0.149 | 0.205 | 0.213 |
| PEG-DSG | 0.065 | 0.145 | 0.172 | 0.196 |
| PEG-DSPE | 0.077 | 0.079 | 0.255 | 0.287 |

TABLE 19

| | Encapsulation Efficiency (%) | | | |
|---|---|---|---|---|
| | 0.5 mol % | 1.5 mol % | 5 mol % | 10 mol % |
| PEG-DMG | 92 | 97 | 92 | 48 |
| PEG-DSG | 91 | 98 | 97 | 39 |
| PEG-DSPE | 92 | 97 | 97 | 58 |

[1231] These results demonstrate there was a lower encapsulation efficiency for LNPs containing 10 mol % PEG-Lipid than for LNPs containing a lower mol % PEG-Lipid concentration.

TABLE 20

| | Zeta Potential (mV) | | | |
|---|---|---|---|---|
| | 0.5 mol % | 1.5 mol % | 5 mol % | 10 mol % |
| PEG-DMG | 0.422 | 2.72 | −4.52 | −1.48 |
| PEG-DSG | 0.477 | −7.05 | −5.36 | −2.2 |
| PEG-DSPE | −2.93 | −1.87 | −2.53 | −2.15 |

### Intratumoral Administration of PEG-Lipid LNPs

[1232] The LNP formulations containing varying mol % of different PEG-Lipids were used to administer a reporter mRNA construct into CT-26 tumors in mice. The reporter mRNA construct encoded a luciferase reporter protein to allow for evaluation of the biodistribution of the mRNA encapsulated by the LNPs. The mRNA construct included a Cap 1 5′ cap, and a 140 polyA tail and was fully modified with 1-methylpseudouridine and 5-methyl-cytosine.

[1233] LNPs formulations as described above, containing either 0.5 mol % or 1.5 mol % PEG-DMG, PEG-DSG or PEG-DSPE were administered intratumorally into BALB/cAnNCrl mice bearing CT-26 tumors (n=4 per group; average tumor size of 290 mm³) at a single dose of 0.05 mg/kg luciferase mRNA. Controls were PBS alone and naked mRNA luciferase in 8.5% sucrose.

[1234] Whole body BLI was performed 2 hours post-treatment. Twenty minutes prior to imaging, mice were injected intraperitoneally with a D-luciferin solution at 150 mg/kg. Animals were then anesthetized and images were acquired with an IVIS Lumina II imaging system (Perkin Elmer). Bioluminescence was measured as total flux (photons/second) of the entire mouse.

[1235] Animals were sacrificed and tumors and livers were harvested at 4 hours post-treatment for ex vivo luciferase protein quantification. The tumor:liver expression ratio for the luciferase reporter protein was determined for each of the PEG-Lipids tested and different mol % concentrations tested.

[1236] The results from both the BLI analysis and the ex vivo protein quantitation showed that, overall, the lower molar percentages of PEG-Lipid improved the tumor:liver ratio post intra-tumor administration and the LNPs containing 0.5 mol % of any of the three PEGs exhibited a higher tumor:liver expression profile at the time points examined compared to those with 1.5 mol %.

### Systemic Administration of PEG-Lipid LNPs

[1237] The LNP formulations containing varying mol % of different PEG-Lipids were used to administer a reporter mRNA construct systemically into mice bearing either a CT-26 subcutaneous tumor or a Hep3B subcutaneous tumor. The same luciferase reporter mRNA construct described above for the intra-tumor studies was used for the systemic administration studies.

[1238] LNPs formulations as described above, containing either 1.5 mol %, 5 mol % or 10 mol % PEG-DMG, PEG-DSG or PEG-DSPE were administered intravenously into BALB/c nude mice bearing Hep3B SC tumors (tumor size range=254-876 mm³; average=548 mm³) or CT-26 SC tumors (tumor size range=278-664 mm³; average=405 mm³) (n=4 per group). Mice were injected IV with 100 μl of 0.04 mg/ml RNA, which is a dose of approximately 0.2 mg/kg luciferase mRNA. Control was PBS alone.

[1239] Whole body BLI was performed 2, 6, 24 and 48 hours post-treatment. Twenty minutes prior to imaging, mice were injected intraperitoneally with a D-luciferin solution at 150 mg/kg. Animals were then anesthetized and images were acquired with an IVIS Lumina II imaging system (Perkin Elmer). The ventral view was imaged at 15 minutes post D-luciferin administration and the tumor side view was imaged at 20 minutes post D-luciferin administration. Bioluminescence was measured as total flux (photons/second) of the entire mouse.

[1240] Animals were sacrificed and tumors and livers were harvested at 4 days post-treatment for ex vivo luciferase protein quantification. The tumor:liver expression ratio for the luciferase reporter protein was determined for each of the PEG-Lipids tested and different mol % concentrations tested.

[1241] The results from both the BLI analysis and the ex vivo protein quantitation showed that the expression profiles of the systemically administered LNPs was better in the Hep3B tumor than in the CT-26 tumors. The BLI analysis showed that 1.5 mol % PEG-DSPE and 5 mol % DSG exhibited the most promising Hep3B tumor expression profile (i.e., higher relative liver signal) within the first 2-48 hours post-treatment. The ex vivo protein quantification analysis demonstrated that the following LNPs exhibited the highest average luciferase protein levels in tumors 52 hours post-treatment: 1.5 mol % PEG-DSG, 5 mol % PEG-DSG and 1.5 mol % DSPE. Since both PEG-DSG and PEG-DSPE utilize C18 lipid side chains, these studies demonstrated that the C18 PEG-Lipids in the LNPs displayed improved tumor:liver expression profiles post systemic administration of the LNPs.

### Example 6

### Additional BH3 Multimer Construct

[1242] In this example, an additional BH3 multimer construct, which contains multiple copies of the Beclin BH3 domain, was prepared. This construct contains three copies of the Beclin BH3 domain, with intervening F2A linker peptides in between and thus has the structure: BeclinBH3-F2A-BeclinBH3-F2A-BeclinBH3, optionally with a v5 epitope tag at the C-terminus.

[1243] The amino acid sequence of construct without the epitope tag is shown below, wherein the BeclinBH3 sequences are in bold and the linker sequences are underlined:

(SEQ ID NO: 546)
MGTMENLSRRLKVTGDLFDIMSGSGVKQTLNFDLLKLAGDVESNPGP
GTMENLSRRLKVTGDLFDIMSGSGVKQTLNFDLLKLAGDVESNPGP
GTMENLSRRLKVTGDLFDIMS

[1244] The amino acid sequences of construct with the C-terminal v5 epitope tag is shown below, wherein the BeclinBH3 sequences are in bold and the linker sequences are underlined:

(SEQ ID NO: 547)
MGTMENLSRRLKVTGDLFDIMSGSGVKQTLNFDLLKLAGDVESNPGP
GTMENLSRRLKVTGDLFDIMSGSGVKQTLNFDLLKLAGDVESNPGP
GTMENLSRRLKVTGDLFDIMSGKPIPNPLLGLDST

[1245] Two different nucleotide sequences encoding the above BeclinBH3x3.F2A amino acid sequence (with v5 tag) are shown below:

(SEQ ID NO: 548)
ATGGGCACCATGGAGAATCTTAGCAGACGACTGAAAGTGACCGGCGATCT
GTTCGACATCATGAGCGGCAGCGGCGTGAAGCAGACCCTGAACTTTGACT
TGCTGAAGCTGGCCGGCGACGTGGAAAGCAACCCCGGACCCGGCACCATG
GAGAACCTGAGCCGGCGGCTGAAGGTGACCGGCGACTTGTTCGACATCAT
GAGCGGCAGCGGAGTGAAGCAGACTTTGAACTTCGACCTTCTGAAACTGG
CCGGCGATGTGGAGAGCAATCCAGGCCCGGGCACCATGGAGAATCTGAGC
AGAAGACTGAAGGTGACTGGCGACCTGTTCGACATTATGAGCGGCAAGCC
CATCCCCAACCCCCTGCTGGGTCTGGATAGCACC
(SEQ ID NO: 549)
ATGGGAACTATGGAGAACCTGTCGCGGAGGTTGAAAGTGACCGGCGACCT
GTTTGACATTATGTCCGGCTCCGGAGTGAAGCAGACCCTGAACTTCGACC
TTTTGAAGCTGGCCGGCGACGTGGAATCGAACCCAGGCCCTGGTACTATG
GAAAACCTCAGCAGACGCCTGAAAGTCACCGGAGATCTGTTCGACATCAT
GAGCGGATCCGGCGTGAAGCAAACTCTGAATTTCGACCTCCTGAAGCTTG
CGGGAGATGTGGAGTCAAACCCGGGGCCCGGTACCATGGAAAATCTGTCC
CGCCGGCTCAAGGTCACCGGGGACCTGTTCGATATCATGTCCGGGAAGCC
TATCCCCAACCCGCTGCTGGGACTCGACAGCACC

[1246] These nucleotide sequences are incorporated into modified mRNA constructs that contain a 5′ UTR having the sequence shown in SEQ ID NO: 72, a 3′ UTR having the sequence shown in SEQ ID NO: 73, a Cap 1 5′ Cap (7mG(5′)ppp(5′)NlmpNp), a poly A tail of 100 nucleotides and are fully modified with 1-methyl-pseudouridine (m1ψ).

[1247] These mmRNA constructs can be translated in cell free systems as described above and used in apoptosis assays as described above.

### Example 7

### Apoptosis of Hep3B Cells Treated with mRNA Encoding Self-Cleaving or Uncleavable Multimeric BH3 Domains

[1248] A series of multimeric BH3 domain constructs were prepared that contained either a self-cleaving linker (F2A or P2A) or an uncleavable linker (GGGS). The structure of these constructs is illustrated schematically in FIG. 8. The top row shows the SQT scaffolded positive control construct SQT-PUMA-BH3 and a BH3 monomer control construct. The middle row shows the self-cleaving constructs, including the final expression products produced after self-cleavage (shown after the arrow). F2A and P2A are self-cleaving linker peptides (F2A is 50% efficient, P2A is >90% efficient). The bottom row shows the uncleavable constructs, which remain as trimer or dimer expression products (shown after the arrow)

[1249] To determine whether the multimeric BH3 domain constructs containing either a self-cleaving linker or an uncleavable linker could induce apoptosis, Hep3B hepatocellular carcinoma cells (20,000 cells/well) were transfected using Lipofectamine 2000 (Life Technologies) with varying doses of the multimeric constructs shown in FIG. 8. As a positive control, an SQT-PUMA-BH3 mmRNA construct encoding a fusion polypeptide of the SQT scaffold linked to a single PUMA BH3 domain, which was known to induce apoptosis, was used. As a negative control, an “empty” SQT mmRNA construct, encoding only the SQT scaffold with no BH3 domain, was used. Cell death was measured by YOYO-3 (Life Technologies) staining after 24 hours.

[1250] The results for apoptosis at 24 hours post-transfection are shown in the graph of FIG. 9. The results demonstrate that all mmRNA constructs encoding multimeric BH3 domains induced apoptosis of Hep3B cells, with the constructs containing uncleavable GGGS linkers ((PUMA BH3.GGGSx3)x3, encoding a trimer, and PUMA BH3.GGGSx3.PUMA, encoding a dimer) exhibiting higher potency than the constructs containing the self-cleaving linkers.

### Example 8

### Lipid Nanoparticle-Formulated Uncleavable Multimeric BH3 Construct Induces Apoptosis in Hep3B Cells

[1251] The efficacy of an mmRNA construct encoding uncleavable multimeric BH3 domains in inducing cell death was tested in the Hep3B hepatocellular carcinoma cell lines using lipid nanoparticle (LNP)-formulated constructs. Hep3B cells (10,000 cells/well) were treated with varying doses of SM86-formulated LNPs containing an mmRNA construct encoding (PUMA BH3.GGGSx3)x3, which encodes a BH3 domain trimer as illustrated schematically in FIG. 8. As a positive control, LNPs containing an SQT-PUMA-BH3 mmRNA construct, encoding a fusion polypeptide of the SQT scaffold linked to a single PUMA BH3 domain, which was known to induce apoptosis, was used. As negative controls, LNPs containing inactive NTFIX or GFP constructs were used. LNPs were applied to the cells in a 3-fold dilution series. Cell death was assessed using YOYO3 fluorescence imaging on Incucyte, followed by analysis of total integrated intensity of red fluorescence.

[1252] The results for apoptosis at 24 hours post-treatment are shown in the graph of FIG. 10. The results demonstrate that LNPs containing the mmRNA construct encoding the uncleavable multimeric BH3 domains induced apoptosis of Hep3B cells with a potency greater than the SQT-PUMA-BH3 positive control construct. The (PUMA BH3.GGGSx3)x3.V5 construct was reproducibly approximately 5-10 fold more potent than the SQT-PUMA-BH3 construct at inducing cell death.

### Example 9

### Preparation and Expression of mRNAs Encoding YAP Inhibitory Domains

[1253] A series of modified mRNA constructs were prepared that encoded one or more copies of selected YAP inhibitory domains from the VGLL4 protein on either a “scaffold” polypeptide (i.e., SQT) or as a multimer. For some constructs, a YAP inhibitory domain was inserted into the N-terminus of the Stefin A Quadruple Mutant-Tracy (SQT) variant of Stefin A, resulting in SQT-YAP inhibitory constructs. Multimer constructs contained multiple YAP inhibitory domains and a linker sequence (i.e., an F2A cleavable linker) between each YAP inhibitory domain. Thus, for example, a multimeric YAP inhibitory construct containing three anti-YAP domains with intervening F2A linkers has the structure: YAP inhibitory-F2A-YAP inhibitory-F2A-YAP inhibitory. The constructs also typically contained an epitope tag (i.e., v5) to facilitate detection of the encoded polypeptide(s). However, the skilled artisan will appreciate that constructs lacking the epitope tag, e.g., v5 tag) are preferable for therapeutic purposes. Some multimeric YAP inhibitory constructs contained F2A linkers between each YAP inhibitory domain and before the C-terminal epitope tag (e.g., having the structure: YAP inhibitory-F2A-YAP inhibitory-F2A-YAP inhibitory-F2A-affinity tag). In the multimer constructs, multiple copies of the same YAP inhibitory domain were used. The amino acid sequence encoded by the open reading frame (ORF) of each construct is shown below in Table 21.

TABLE 21
YAP inhibitory constructs

| mRNA Name(s) | ORF Amino Acid Sequence | SEQ |
|---|---|---|
| Super TDU | SVDDHFAKSLGDTWLQIGGSGNPKTANVPQTVPMRLRK | 463 |
| (NLS).cV5 | LPDSFFKPPEMTYPRRRFRRRRHRPRSHLGQILRRRPWL | |
| | VHPRHRYRWRRKNGIFNTGKPIPNPLLGLDST | |
| Super TDU | SVDDHFAKSLGDTWLQIGGSGNPKTANVPQTVPMRLRK | 464 |
| (sv40NLS).cV5 | LPDSFFKPPEPKKKRKVPKKKRKVPKKKRKVGIFNTGKP | |
| | IPNPLLGLDST | |
| MF2A(NLS).cV5 | SVDDHFAKSLGDTWLQIGGSGNPKTANVPQTVPARLRK | 465 |
| | LPDSAFKPPEMTYPRRRFRRRRHRPRSHLGQILRRRPWL | |
| | VHPRHRYRWRRKNGIFNTGKPIPNPLLGLDST | |
| MF2A(sv40NLS).cV5 | SVDDHFAKSLGDTWLQIGGSGNPKTANVPQTVPARLRK | 466 |
| | LPDSAFKPPEPKKKRKVPKKKRKVPKKKRKVGKPIPNPL | |
| | LGLDST | |
| HFMF4A(NLS).cV5 | SVDDAAAKSLGDTWLQIGGSGNPKTANVPQTVPARLRK | 467 |
| | LPDSAFKPPEMTYPRRRFRRRRHRPRSHLGQILRRRPWL | |
| | VHPRHRYRWRRKNGIFNTGKPIPNPLLGLDST | |
| HFMF4A(sv40NLS).c | SVDDAAAKSLGDTWLQIGGSGNPKTANVPQTVPARLRK | 468 |
| V5 | LPDSAFKPPEPKKKRKVPKKKRKVPKKKRKVGKPIPNPL | |
| | LGLDST | |
| huVGLL4- | STMGDPVVEEHFRRSLGKNYKEPEPAPNSVSITGSVDDH | 469 |
| TDU1.2(NLS).cV5 | FAKALGDTWLQIKAAKDSAMTYPRRRFRRRRHRPRSHL | |
| | GQILRRRPWLVHPRHRYRWRRKNGIFNTGKPIPNPLLGL | |
| | DST | |
| huVGLL4- | STMGDPVVEEHFRRSLGKNYKEPEPAPNSVSITGSVDDH | 470 |
| TDU1.2(sv40NLS).cV | FAKALGDTWLQIKAAKDSAPKKKRKVPKKKRKVPKKK | |
| 5 | RKVGKPIPNPLLGLDST | |
| huVGLL4.cV5 | METPLDVLSRAASLVHADDEKREAALRGEPRIQTLPVAS | 471 |
| | ALSSHRTGPPPISPSKRKFSMEPGDEDLDCDNDHVSKMS | |
| | RIFNPHLNKTANGDCRRDPRERSRSPIERAVAPTMSLHGS | |
| | HLYTSLPSLGLEQPLALTKNSLDASRPAGLSPTLTPGERQ | |
| | QNRPSVITCASAGARNCNLSHCPIAHSGCAAPGPASYRR | |
| | PPSAATTCDPVVEEHFRRSLGKNYKEPEPAPNSVSITGSV | |
| | DDHFAKALGDTWLQIKAAKDGASSSPESASRRGQPASPS | |
| | AHMVSHSHSPSVVSGKPIPNPLLGLDST | |
| huVGLL4(HF4A).cV5 | METPLDVLSRAASLVHADDEKREAALRGEPRIQTLPVAS | 472 |
| | ALSSHRTGPPPISPSKRKFSMEPGDEDLDCDNDHVSKMS | |
| | RIFNPHLNKTANGDCRRDPRERSRSPIERAVAPTMSLHGS | |
| | HLYTSLPSLGLEQPLALTKNSLDASRPAGLSPTLTPGERQ | |
| | QNRPSVITCASAGARNCNLSHCPIAHSGCAAPGPASYRR | |
| | PPSAATTCDPVVEEAARRSLGKNYKEPEPAPNSVSITGSV | |
| | DDAAAKALGDTWLQIKAAKDGASSSPESASRRGQPASP | |
| | SAHMVSHSHSPSVVSGKPIPNPLLGLDST | |
| SQT.(nt)VGLL4- | MIPRDPVVEEHFRRSLGKNYKEGLSEAKPATPEIQEIVDK | 473 |
| TDU1.(sv40NLS).cV5 | VKPQLEEKTNETYGKLEAVQYKTQVLASTNYYIKVRAG | |
| | DNKYMHLKVFNGPPGQNADRVLTGYQVDKNKDDELTG | |
| | FPKKKRKVPKKKKVPKKKRKVGKPIPNPLLGLDST | |
| SQT.(L1)VGLL4- | MIPRGLSEAKPATPEIQEIVDKVKPQLEEKTNETYGKLEA | 474 |
| TDU1.(sv40NLS).cV5 | VQYKTQVLDPVVEEHFRRSLGKNYKASTNYYIKVRAGD | |
| | NKYMHLKVFNGPPGQNADRVLTGYQVDKNKDDELTGF | |
| | PKKKRKVPKKKRVPKKKRKVGKPIPNPLLGLDST | |
| SQT.(L2)VGLL4- | MIPRGLSEAKPATPEIQEIVDKVKPQLEEKTNETYGKLEA | 475 |
| TDU1.(sv40NLS).cV5 | VQYKTQVLASTNYYIKVRAGDNKYMHLKVFNGPDPVV | |
| | EEHFRRSLGKNYKPGQNADRVLTGYQVDKNKDDELTGF | |
| | PKKKRKVPKKKRVPKKKRKVGKPIPNPLLGLDST | |
| SQT.(nt)VGLL4- | MIPRSVSITGSVDDHFAKALGDTWLQIKGLSEAKPATPEI | 476 |
| TDU2.(sv40NLS).cV5 | QEIVDKVKPQLEEKTNETYGKLEAVQYKTQVLASTNYYI | |
| | KVRAGDNKYMHLKVFNGPPGQNADRVLTGYQVDKNK | |
| | DDELTGFPKKKRVPKKKRKVPKKKRKVGKPIPNPLLGL | |
| | DST | |
| SQT.(L1)VGLL4- | MIPRGLSEAKPATPEIQEIVDKVKPQLEEKTNETYGKLEA | 477 |
| TDU2.(sv40NLS).cV5 | VQYKTQVLSVSITGSVDDHFAKALGDTWLQIKASTNYYI | |
| | KVRAGDNKYMHLKVFNGPPGQNADRVLTGYQVDKNK | |
| | DDELTGFPKKKRVPKKKRKVPKKKRKVGKPIPNPLLGL | |
| | DST | |
| SQT.(L2)VGLL4- | MIPRGLSEAKPATPEIQEIVDKVKPQLEEKTNETYGKLEA | 478 |
| TDU2.(sv40NLS).cV5 | VQYKTQVLASTNYYIKVRAGDNKYMHLKVFNGPSVSIT | |
| | GSVDDHFAKALGDTWLQIKPGQNADRVLTGYQVDKNK | |
| | DDELTGFPKKKRVPKKKRKVPKKKRKVGKPIPNPLLGL | |
| | DST | |
| huVGLL4- | STMGDPVVEEHFRRSLGKNYKEPEMTYPRRRFRRRRHR | 479 |
| TDU1(NLS).cV5 | PRSHLGQILRRRPWLVHPRHRYRWRRKNGIFNTGKPIPN | |
| | PLLGLDST | |
| huVGLL4- | STMSVSITGSVDDHFAKALGDTWLQIKAAKDSAMTYPR | 480 |
| TDU2(NLS).cV5 | RRFRRRRHRPRSHLGQILRRRPWLVHPRHRYRWRRKNG | |
| | IFNTGKPIPNPLLGLDST | |
| TandemPep.VGLL4.su | MSVDDHFAKSLGDTWLQIGSGVKQTLNFDLLKLAGDVE | 499 |
| perTDU | SNPGPSVDDHFAKSLGDTWLQIGSGVKQTLNFDLLKLA | |
| | GDVESNPGPSVDDHFAKSLGDTWLQIGKPIPNPLLGLDS | |
| | T | |
| TandemPep.VGLL4.T | MDPVVEEHFRRSLGKNYKEGSGVKQTLNFDLLKLAGDV | 500 |
| DU1 | ESNPGPDPVVEEHFRRSLGKNYKEGSGVKQTLNFDLLKL | |
| | AGDVESNPGPDPVVEEHFRRSLGKNYKEGKPIPNPLLGL | |
| | DST | |
| TandemPep.VGLL4.T | MSVSITGSVDDHFAKALGDTWLQIKGSGVKQTLNFDLL | 501 |
| DU2 | KLAGDVESNPGPSVSITGSVDDHFAKALGDTWLQIKGSG | |
| | VKQTLNFDLLKLAGDVESNPGPSVSITGSVDDHFAKALG | |
| | DTWLQIKGKPIPNPLLGLDST | |
| TandemPep.HFMF4A | MSVDDAAAKSLGDTWLQIGGSGNPKTANVPQTVPARLR | 502 |
| | KLPDSAFKPPEGSGVKQTLNFDLLKLAGDVESNPGPSVD | |
| | DAAAKSLGDTWLQIGGSGNPKTANVPQTVPARLRKLPD | |
| | SAFKPPEGSGVKQTLNFDLLKLAGDVESNPGPSVDDAA | |
| | AKSLGDTWLQIGGSGNPKTANVPQTVPARLRKLPDSAF | |
| | KPPEGKPIPNPLLGLDST | |
| TandemPep.MF2A | MSVDDHFAKSLGDTWLQIGGSGNPKTANVPQTVPARLR | 503 |
| | KLPDSAFKPPEGSGVKQTLNFDLLKLAGDVESNPGPSVD | |
| | DHFAKSLGDTWLQIGGSGNPKTANVPQTVPARLRKLPD | |
| | SAFKPPEGSGVKQTLNFDLLKLAGDVESNPGPSVDDHFA | |
| | KSLGDTWLQIGGSGNPKTANVPQTVPARLRKLPDSAFKP | |
| | PEGKPIPNPLLGLDST | |

[1254] The modified mRNA multimer constructs contained a 5′ UTR having the sequence shown in SEQ ID NO: 72 and a 3′ UTR having the sequence shown in SEQ ID NO: 73. The open reading frame (ORF) amino acid sequence shown in Table 21 encoded by the mRNA constructs include a v5 epitope tag sequence incorporated into the C-terminus of the sequence. This v5 epitope tag has the amino acid sequence: GKPIPNPLLGLDST (SEQ ID NO: 545). YAP inhibitory mRNA constructs having the open reading frames shown above in Table 21 but lacking the v5 epitope tag can also be prepared simply by deletion of the amino acids GKPIPNPLLGLDST (SEQ ID NO: 545) at the C-terminus of the sequences shown in Table 21.

[1255] Amino acid sequences corresponding to the constructs of SEQ ID NOs: 463-480 and 499-503 but without the epitope tag are shown in SEQ ID NOs: 481-498 and 504-507. Nucleotide sequences encoding the amino acid sequences shown in SEQ ID NOs: 463-480 and 499-503 are shown in SEQ ID NOs: 508-544.

### Example 10

### Induction of Apoptosis by Transfection of HGC27 and A549 Cells with mRNA Encoding YAP Inhibitory Domains

[1256] To determine whether YAP inhibitory domain constructs could induce apoptosis, HGC27 metastatic lymphoma cells and A549 lung carcinoma cells were used, which express high levels of YAP1.

[1257] 10,000 cells/well were plated in 96 well plates and the cells were transfected with 50 ng/100 mL of the different mRNA constructs using Lipofectamine 2000 (Life Technologies). Transfection was done in the presence of YOYO-3 (Life Technologies), a DNA dye that is taken up preferentially by dead cells that is used to measure the extent of cell death. The results for apoptosis at 72 hours post-transfection are shown in FIG. 11A for HGC27 cells and FIG. 11B for A549 cells. The results demonstrate that several YAP inhibitory constructs are cytotoxic to cell lines with high levels of YAP1. Constructs MF2A(NLS).cV5, huVGLL4-TDU1.2(sv40NLS).cV5, SQT.(L1)VGLL4-TDU2(sv40NLS).cV5, huVGLL4-TDU2(NLS).cV5 induced the highest levels of apoptosis in both cell lines.

[1258] Live images were taken over the 72 hours using Incucyte (Essen Bioscience). These images showed the uptake of YOYO-3 and confirmed that these constructs induced apoptosis. Overall, these results indicated that several YAP inhibitory constructs were capable of inducing apoptosis in metastatic lymphoma cells and in lung carcinoma cells.

### Example 11

### Binding of Anti-YAP1 Constructs to TEAD Transcription Factors

[1259] To determine whether YAP inhibitory constructs were binding with TEAD transcription factors, 2×10⁶ HGC27 cells were plated and transfected with 7.2 ug mRNA using Lipofectamine 2000. Cells were harvested after 6 hours and protein lysates were prepared using Pierce IP Lysis buffer (Thermo Fisher). Immunoprecipitation was performed using anti-V5 antibody (Life Technologies) against the epitope tag contained within the YAP inhibitory constructs. Immunoprecipitated samples were then run on a 4-12% Bis-Tris gel (Life Technologies) and transferred onto a 0.2 mm nitrocellulose membrane. For Western blot analysis, the membrane was probed with anti-TEAD4 antibody (Abcam) followed by HRP Rat Anti-Mouse Igk, Light Chain antibody (BD Pharmingen).

[1260] FIG. 12 shows the results of the Western blot analysis, wherein five out of six YAP inhibitory constructs were demonstrated to bind to TEAD4. These results indicated that transfection of the YAP inhibitory mRNA constructs into cells led to translation of the YAP inhibitory protein constructs and these protein constructs were capable of binding to a transcription factor (TEAD4) known to be regulated by YAP.

### Example 12

### Downregulation of YAP-Target Genes by Transfection of HGC27 Cells with mRNA Encoding YAP Inhibitory Domains

[1261] To determine whether YAP inhibitory constructs that bind to TEAD4 effect downstream YAP target genes (i.e., CTGF and CYR61), HGC27 cells were utilized. Specifically, 24 hours after 100,000 cells per well of a 24-well plate were seeded, each well was transfected with 250 ng of CMV-YAP1-puro plasmid with 0.5 μL Lipofectamine 2000 (Life Technologies). YAP1-containing cells were selected using 1 g/mL puromycin (Gibco) for 48 hours. Puromycin-selected cells were transfected with 250 g of YAP inhibitory mRNA using 1 uL Lipofectamine 2000. As a positive control, YAP-CMV plasmid was used. As a negative control, eGFP mRNA was used. 48 hours after transfection, RNA was extracted using the RNeasy kit (Qiagen) and cDNA was prepared using the High-Capacity cDNA Reverse Transcription Kit (ABI). qPCR reaction was performed using the TaqMan Fast Advanced Master Mix Reagent with CTGF (Hs01026927_g1) and/or CYR61 (Hs00998500_g1), and PPIA endogenous control (4326316E) Taqman probes (Life Technologies).

[1262] FIG. 13 shows the four YAP inhibitory constructs tested, which were shown to bind TEAD4, downregulated CTGF and CYR61. These results indicated that the YAP inhibitory mRNA constructs that bind TEAD4 have downstream effects on the YAP pathway.

### Example 13

### Induction of Apoptosis by Transfection of NCI-N87 Cells with mRNA Encoding YAP Inhibitory Domains

[1263] To determine whether the YAP inhibitory constructs capable of inducing apoptosis in HGC27 and A549 cells, could also induce apoptosis in another cell type, NCI-N87 gastric carcinoma cells were used. Specifically, 20,000 cells/well of a 96-well plate were transfected with 50 ng mRNA with Lipofectamine 2000. As a positive control, an SQT-PUMA-BH3 mRNA construct encoding a fusion polypeptide of the SQT scaffold linked to a single PUMA BH3 domain, which was known to induce apoptosis, was used.

[1264] Images were taken 72 hours after transfection using Incucyte. The images showed the uptake of YOYO-3, which confirmed five out of thirteen constructs induced apoptosis (FIG. 14). These results demonstrate that YAP inhibitory mRNA constructs were capable of inducing apoptosis in a variety of cancer cells.

### Other Embodiments

[1265] It is to be understood that while the present disclosure has been described in conjunction with the detailed description thereof, the foregoing description is intended to illustrate and not limit the scope of the present disclosure, which is defined by the scope of the appended claims. Other aspects, advantages, and alterations are within the scope of the following claims.

[1266] All references described herein are incorporated by reference in their entireties.

SEQUENCE LISTING SUMMARY

| SEQ | |
|---|---|
| ID | |
| NO: | SEQUENCE |
| 1 | LALRLACIGDEMDVS (BH3 domain amino acid sequence) |
| 2 | EKAELLQGGDLLRQR (BH3 domain amino acid sequence) |
| 3 | VESILKKNSDWIWDW (BH3 domain amino acid sequence) |
| 4 | EVEALKKSADWVSDW (BH3 domain amino acid sequence) |
| 5 | TAARLKALGDELHQR (BH3 domain amino acid sequence) |
| 6 | IAQELRRIGDEFNAY (BH3 domain amino acid sequence) |
| 7 | YGRELRRMSDEFVDS (BH3 domain amino acid sequence) |
| 8 | IARHLAQVGDSMDRS (BH3 domain amino acid sequence) |
| 9 | IARKLQCIADQFHRL (BH3 domain amino acid sequence) |
| 10 | CATQLRRFGDKLNFR (BH3 domain amino acid sequence) |
| 11 | IGAQLRRMADDLNAQ (BH3 domain amino acid sequence) |
| 12 | LSRRLKVTGDLFDIM (BH3 domain amino acid sequence) |
| 13 | IVELLKYSGDQLERK (BH3 domain amino acid sequence) |
| 14 | ALETLRRVGDGVQRN (BH3 domain amino acid sequence) |
| 15 | IGSKLAAMCDDFDAQ (BH3 domain amino acid sequence) |
| 16 | IGRKLTVMCDEFDSE (BH3 domain amino acid sequence) |
| 17 | NIRRLRALADGVQKV (BH3 domain amino acid sequence) |
| 18 | NIDKLRALADDIDKT (BH3 domain amino acid sequence) |
| 19 | MVTLLPIEGQEIHFF (BH3 domain amino acid sequence) |
| 20 | PTVPLPSETDGYVAP (BH3 domain amino acid sequence) |
| 21 | PQRYLVIQGDDRMKL (BH3 domain amino acid sequence) |
| 22 | TVGELSRALGHENGS (BH3 domain amino acid sequence) |
| 23 | VGQLLQDMGDDVYQQ (BH3 domain amino acid sequence) |
| 24 | LHEVLNGLLDRPDWE (BH3 domain amino acid sequence) |
| 25 | AVHSLSRIGDELYLE (BH3 domain amino acid sequence) |
| 26 | NPKFLKNAGRDCSRR (BH3 domain amino acid sequence) |
| 27 | EEQWAREIGAQLRRMADDLNAQYERR (BH3 domain amino acid sequence) |
| 28 | DMRPEIWIAQELRRIGDEFNAYYARR (BH3 domain amino acid sequence) |
| 29 | NLWAAQRYGRELRRMSDEFVDSFKKG (BH3 domain amino acid sequence) |
| 30 | PAELEVECATQLRRFGKLNFRQKLL (BH3 domain amino acid sequence) |
| 31 | UAUUUAGUGUGAUAAUGGCGUU (miR-122 sequence) |
| 32 | CAAACACCAUUGUCACACUCCA (miR-122 sequence) |
| 33 | UAGCUUAUCAGACUGAUGUUGA (miR-21 sequence) |
| 34 | CAACACCAGUCGAUGGGCUGU (miR-21 sequence) |
| 35 | GSGATNFSLLKQAGDVEENPGP (2A peptide amino acid sequence) |
| 36 | GGAAGCGGAGCTACTAACTTCAGCCTGCTGAAGCAGGCTGGAGACGTGG |
| | AGGAGAACCCTGGACCT (2A peptide encoding sequence) |
| 37 | TCCGGACTCAGATCCGGGGATCTCAAAATTGTCGCTCCTGTCAAACAAAC |
| | TCTTAACTTTGATTTACTCAAACTGGCTGGGGATGTAGAAAGCAATCCAG |
| | GTCCACTC (2A peptide encoding sequence) |
| 38 | MAHAGRTGYDNREIVMKYIHYKLSQRGYEWDAGDVGAAPPGAAPAP |
| | GIFSSQPGHTPHPAASRDPVARTSPLQTPAAPGAAAGPALSPVPPVVHL |
| | TLRQAGDDFSRRYRRDFAEMSSQLHLTPFTARGRFATVVEELFRDGVN |
| | WGRIVAFFEFGGVMCVESVNREMSPLVDNIALWMTEYLNRHLHTWIQ |
| | DNGGWDAFVELYGPSMRPLFDFSWLSLKTLLSLALVGACITLGAYLGHK |
| | (Human Bcl-2 amino acid sequence, Genbank NP_000624) |
| 39 | MSQSNRELVVDFLSYKLSQKGYSWSQFSDVEENRTEAPEGTESEMETPSA |
| | INGNPSWHLADSPAVNGATGHSSSLDAREVIPMAAVKQALREAGDEFELR |
| | YRRAFSDLTSQLHITPGTAYQSFEQVVNELFRDGVNWGRIVAFFSFGGAL |
| | CVESVDKEMQVLVSRIAAWMATYLNDHLEPWIQENGGWDTFVELYGNN |
| | AAAESRKGQERFNRWFLTGMTVAGVVLLGSLFSRK |
| | (Human Bcl-X_{L} amino acid sequence, Genbank NP_612815.1) |
| 40 | MATPASAPDTRALVADFVGYKLRQKGYVCGAGPGEGPAADPLHQAMRA |
| | AGDEFETRFRRTFSDLAAQLHVTPGSAQQRFTQVSDELFQGGPNWGRLVA |
| | FFVFGAALCAESVNKEMEPLVGQVQEWMVAYLETRLADWIHSSGGWAEF |
| | TALYGDGALEEARRLREGNWASVRTVLTGAVALGALVTVGAFFASK |
| | (Human Bcl-w amino acid sequence, Genbank NP_004041.1) |
| 41 | MFGLKRNAVIGLNLYCGGAGLGAGSGGATRPGGRLLATEKEASARREIGG |
| | GEAGAVIGGSAGASPPSTLTPDSRRVARPPPIGAEVPDVTATPARLLFFAPTR |
| | RAAPLEEMEAPAADAIMSPEEELDGYEPEPLGKRPAVLPLLELVGESGNNT |
| | STDGSLPSTPPPAEEEEDELYRQSLEIISRYLREQATGAKDTKPMGRSGATSR |
| | KALETLRRVGDGVQRNHETAFQGMLRKLDIKNEDDVKSLSRVMIHVFSDGV |
| | TNWGRIVTLISFGAFVAKHLKTINQESCIEPLAESITDVLVRTKRDWLVKQRG |
| | WDGFVEFFHVEDLEGGIRNVLLAFAGVAG VGAGLAYLIR |
| | (Human Mcl-1 amino acid sequence, Genbank NP_068779.1) |
| 42 | MTDCEFGYIYRLAQDYLQCVLQIPQPGSGPSKTSRVLQNVAFSVQKEVEK |
| | NLKSCLDNVNVVSVDTARTLFNQVMEKEFEDGIINWGRIVTIFAFEGILIKK |
| | LLRQQIAPDVDTYKEISYFVAEFIMNNTGEWIRQNGGWENGFVKKFEPKSG |
| | WMTFLEVTGKICEMLSLLKQYC |
| | (Human Bcl-related protein A1 amino acid sequence, Genbank NP_004040.1) |
| 43 | ATGATACCCAGACAAGAGGACATCATTCGTAACATCGCGCGACACCTGGC |
| | CCAGGTGGGGGACTCCATGGATCGATCAATCCCCCCTGGCTTATCCGAAG |
| | CTAAGCCAGCCACCCCTGAGATCCAAGAAATCGTCGACAAGGTCAAGCCC |
| | CAACTTGAAGAGAAAACTAATGAAACTTATGGTAAGCTCGAAGCCGTGCA |
| | ATACAAGACTCAGGTCCTGGCGTCTACAAATTATTACATCAAGGTGAGGG |
| | CCGGGGACAATAAGTATATGCATCTGAAAGTCTTCAATGGCCCCCCTGGA |
| | CAAAACGCAGATCGGGTGCTCACAGGATACCAGGTCGATAAAAATAAAG |
| | ATGACGAACTTACTGGGTTTGATTATAAAGATGATGATGACAAG |
| | (SQT(nt)BID-BH3 mRNA sequence with FLAG epitope tag) |
| 44 | ATGATTCCTCGGGGTTTGTCAGAGGCAAAGCCAGCCACCCCAGAAATACA |
| | GGAAATCGTAGACAAAGTGAAGCCCCAGCTTGAGGAAAAAACTAACGAG |
| | ACCTACGGGAAGCTGGAAGCTGTGCAGTACAAGACCCAGGTGCTACAGG |
| | AGGACATCATTAGGAATATTGCGAGACATCTGGCGCAAGTGGGTGACTCT |
| | ATGGATCGTTCCATTCCACCGGGTGCAAGCACCAATTATTACATCAAAGT |
| | GCGTGCTGGAGACAACAAATATATGCACCTCAAGGTTTTTAACGGGCCGC |
| | CAGGACAGAATGCAGACCGTGTGCTTACCGGGTATCAGGTAGACAAAAA |
| | TAAAGATGACGAGCTGACTGGCTTTGACTACAAGGATGACGATGACAAG |
| | (SQT(L1)BID-BH3 mRNA sequence with FLAG epitope tag) |
| 45 | ATGATCCCCAGGGGACTCTCCGAGGCAAAGCCAGCCACACCTGAAATTCA |
| | GGAAATCGTTGATAAAGTAAAGCCACAGCTTGAGGAAAAAACCAATGAG |
| | ACGTACGGCAAACTCGAAGCCGTGCAGTACAAGACCCAGGTATTAGCCTC |
| | CACCAACTACTACATAAAGGTGCGGGCCGGCGACAACAAGTACATGCATC |
| | TGAAAGTATTCAACGGTCCCCAGGAAGACATTATAAGGAACATTGCCCGC |
| | CATCTTGCTCAGGTGGGCGATTCCATGGACCGTAGCATACCTCCTGGGCA |
| | GAACGCCGATCGCGTACTCACGGGCTATCAAGTCGATAAAAACAAGGAT |
| | GATGAATTGACTGGGTTTGATTACAAAGATGATGACGATAAG |
| | (SQT(L2)BID-BH3 mRNA sequence with FLAG epitope tag) |
| 46 | ATGATACCCAGACAAGAGGACATCATTCGTAACATCGCGCGACACCTGGC |
| | CCAGGTGGGGGACTCCATGGATCGATCAATCCCCCCTGGCTTATCCGAAG |
| | CTAAGCCAGCCACCCCTGAGATCCAAGAAATCGTCGACAAGGTCAAGCCC |
| | CAACTTGAAGAGAAAACTAATGAAACTTATGGTAAGCTCGAAGCCGTGCA |
| | ATACAAGACTCAGGTCCTGGCGTCTACAAATTATTACATCAAGGTGAGGG |
| | CCGGGGACAATAAGTATATGCATCTGAAAGTCTTCAATGGCCCCCCTGGA |
| | CAAAACGCAGATCGGGTGCTCACAGGATACCAGGTCGATAAAAATAAAG |
| | ATGACGAACTTACTGGGTTT |
| | (SQT(nt)BID-BH3 mRNA sequence without epitope tag) |
| 47 | ATGATTCCTCGGGGTTTGTCAGAGGCAAAGCCAGCCACCCCAGAAATACA |
| | GGAAATCGTAGACAAAGTGAAGCCCCAGCTTGAGGAAAAAACTAACGAG |
| | ACCTACGGGAAGCTGGAAGCTGTGCAGTACAAGACCCAGGTGCTACAGG |
| | AGGACATCATTAGGAATATTGCGAGACATCTGGCGCAAGTGGGTGACTCT |
| | ATGGATCGTTCCATTCCACCGGGTGCAAGCACCAATTATTACATCAAAGT |
| | GCGTGCTGGAGACAACAAATATATGCACCTCAAGGTTTTTAACGGGCCGC |
| | CAGGACAGAATGCAGACCGTGTGCTTACCGGGTATCAGGTAGACAAAAA |
| | TAAAGATGACGAGCTGACTGGCTTT |
| | (SQT(L1)BID-BH3 mRNA sequence without epitope tag) |
| 48 | ATGATCCCCAGGGGACTCTCCGAGGCAAAGCCAGCCACACCTGAAATTCA |
| | GGAAATCGTTGATAAAGTAAAGCCACAGCTTGAGGAAAAAACCAATGAG |
| | ACGTACGGCAAACTCGAAGCCGTGCAGTACAAGACCCAGGTATTAGCCTC |
| | CACCAACTACTACATAAAGGTGCGGGCCGGCGACAACAAGTACATGCATC |
| | TGAAAGTATTCAACGGTCCCCAGGAAGACATTATAAGGAACATTGCCCGC |
| | CATCTTGCTCAGGTGGGCGATTCCATGGACCGTAGCATACCTCCTGGGCA |
| | GAACGCCGATCGCGTACTCACGGGCTATCAAGTCGATAAAAACAAGGAT |
| | GATGAATTGACTGGGTTT |
| | (SQT(L2)BID-BH3 mRNA sequence without epitope tag) |
| 49 | ATGATCCCAAGAGAAGAACAGTGGGCACGCGAAATTGGAGCTCAACTCA |
| | GACGGATGGCCGACGACCTGAACGCCCAGTACGAGCGGCGGGGACTCTC |
| | AGAAGCGAAGCCTGCCACCCCCGAAATCCAGGAAATCGTCGACAAGGTC |
| | AAGCCGCAGCTTGAGGAAAAGACCAACGAGACTTACGGAAAACTGGAGG |
| | CCGTGCAGTATAAGACCCAAGTGTTGGCCTCCACCAACTACTACATTAAG |
| | GTCCGCGCCGGCGATAACAAGTACATGCACCTGAAGGTGTTCAATGGTCC |
| | TCCGGGACAGAACGCGGACAGGGTGCTGACTGGCTACCAAGTGGACAAG |
| | AACAAGGACGACGAGCTGACGGGCTTCGACTACAAGGATGATGATGACA |
| | AA |
| | (SQT-PUMA-BH3 mRNA sequence with FLAG epitope tag) |
| 50 | ATGATCCCAAGAGACATGCGCCCCGAAATTTGGATCGCCCAGGAGCTCAG |
| | ACGCATCGGAGATGAATTCAACGCATACTACGCTCGGCGGGGACTCTCAG |
| | AAGCGAAGCCTGCCACCCCCGAAATCCAGGAAATCGTCGACAAGGTCAA |
| | GCCGCAGCTTGAGGAAAAGACCAACGAGACTTACGGAAAACTGGAGGCC |
| | GTGCAGTATAAGACCCAAGTGTTGGCCTCCACCAACTACTACATTAAGGT |
| | CCGCGCCGGCGATAACAAGTACATGCACCTGAAGGTGTTCAATGGTCCTC |
| | CGGGACAGAACGCGGACAGGGTGCTGACTGGCTACCAAGTGGACAAGAA |
| | CAAGGACGACGAGCTGACGGGCTTCGACTACAAGGATGATGATGACAAA |
| | (SQT-BIM-BH3 mRNA sequence with FLAG epitope tag) |
| 51 | ATGATCCCAAGAAACCTGTGGGCTGCACAACGCTACGGAAGAGAACTGC |
| | GCCGGATGAGCGACGAATTTGTGGACTCGTTCAAGAAGGGGGGACTCTCA |
| | GAAGCGAAGCCTGCCACCCCCGAAATCCAGGAAATCGTCGACAAGGTCA |
| | AGCCGCAGCTTGAGGAAAAGACCAACGAGACTTACGGAAAACTGGAGGC |
| | CGTGCAGTATAAGACCCAAGTGTTGGCCTCCACCAACTACTACATTAAGG |
| | TCCGCGCCGGCGATAACAAGTACATGCACCTGAAGGTGTTCAATGGTCCT |
| | CCGGGACAGAACGCGGACAGGGTGCTGACTGGCTACCAAGTGGACAAGA |
| | ACAAGGACGACGAGCTGACGGGCTTCGACTACAAGGATGATGATGACAA |
| | A (SQT-BAD-BH3 mRNA sequence with FLAG epitope tag) |
| 52 | ATGATCCCAAGACCCGCAGAGCTCGAAGTGGAATGCGCTACCCAACTTAG |
| | ACGGTTCGGAGACAAGCTGAACTTTCGGCAGAAGCTCCTGGGACTCTCAG |
| | AAGCGAAGCCTGCCACCCCCGAAATCCAGGAAATCGTCGACAAGGTCAA |
| | GCCGCAGCTTGAGGAAAAGACCAACGAGACTTACGGAAAACTGGAGGCC |
| | GTGCAGTATAAGACCCAAGTGTTGGCCTCCACCAACTACTACATTAAGGT |
| | CCGCGCCGGCGATAACAAGTACATGCACCTGAAGGTGTTCAATGGTCCTC |
| | CGGGACAGAACGCGGACAGGGTGCTGACTGGCTACCAAGTGGACAAGAA |
| | CAAGGACGACGAGCTGACGGGCTTCGACTACAAGGATGATGATGACAAA |
| | (SQT-NoxA-BH3 mRNA sequence with FLAG epitope tag) |
| 53 | MIPGGLSEAKPATPEIQEIVDKVKPQLEEKTNETYGKLEAVQYKTQVVAGTN |
| | YYIKVRAGDNKYMHLKVFKSLPGQNEDLVLTGYQVDKNKDDELTGF |
| | (WT SteA scaffold amino acid sequence) |
| 54 | MIPWGLSEAKPATPEIQEIVDKVKPQLEEKTNETYGKLEAVQYKTQVDAGTN |
| | YYIKVRAGDNKYMHLKVFNGPPGQNEDLVLTGYQVDKNKDDELTGF |
| | (SteA scaffold (STM) amino acid sequence) |
| 55 | MIPGGLSEAKPATPEIQEIVDKVKPQLEEKTNETYGKLEAVQYKTQVLASTNY |
| | YIKVRAGDNKYMHLKVFNGPPGQNEDLVRSGYQVDKNKDDELTGF |
| | (SteA scaffold (SDM) amino acid sequence) |
| 56 | MIPRGLSEAKPATPEIQEIVDKVKPQLEEKTNETYGKLEAVQYKTQVLASTNY |
| | YIKVRAGDNKYMHLKVFNGPPGQNEDLVRSGYQVDKNKDDELTGF |
| | (SteA scaffold (SQM) amino acid sequence) |
| 57 | MIPGGLSEAKPATPEIQEIVDKVKPQLEEKTNETYGKLEAVQYKTQVVAGTN |
| | YYIKVRAGDNKYMHLKVF NGPPGQNEDLVRSGYQVDKNKDDELTGF |
| | (SteA scaffold (SUC) amino acid sequence) |
| 58 | MIPGGLSEAKPATPEIQEIVDKVKPQLEEKTNETYGKLEAVQYKTQVLASTNY |
| | YIKVRAGDNKYMHLKVFKSLPGQNEDLVLTGYQVDKNKDDELTGF |
| | (SteA scaffold (SUM) amino acid sequence) |
| 59 | MIPRGLSEAKPATPEIQEIVDKVKPQLEEKTNETYGKLEAVQYKTQVVAGTN |
| | YYIKVRAGDNKYMHLKVFKSLPGQNEDLVLTGYQVDKNKDDELTGF |
| | (SteA scaffold (SUN) amino acid sequence) |
| 60 | MIPGGLSEAKPATPEIQEIVDKVKPQLEEKTNETYGKLEAVQYKTQVLASTNY |
| | YIKVRAGDNKYMHLKVFNGPPGQNEDLVRS |
| | (SteA scaffold (SDM-) amino acid sequence) |
| 61 | MIPGGLSEAKPATPEIQEIVDKVKPQLEEKTNETYGKLEAVQYKTQVLASTNY |
| | YIKVRAGDNKYMHLKVFNGP (SteA scaffold (SDM--) amino acid sequence) |
| 62 | MIPRGLSEAKPATPEIQEIVDKVKPQLEEKTNETYGKLEAVQYKTQVLASTNY |
| | YIKVRAGDNKYMHLKVFNGPPGQNEDLVRS |
| | (SteA scaffold (SQM-) amino acid sequence) |
| 63 | MIPRGLSEAKPATPEIQEIVDKVKPQLEEKTNETYGKLEAVQYKTQVLASTNY |
| | YIKVRAGDNKYMHLKVFNGP (SteA scaffold (SQM--) amino acid sequence) |
| 64 | MIPGGLSEAKPATPEIQEIVDKVKPQLEEKTNETYGKLEAVQYKTQVVAGTN |
| | YYIKVRAGDNKYMHLKVFNGPPGQNEDLVRS |
| | (SteA scaffold (SUC-) amino acid sequence) |
| 65 | MIPGGLSEAKPATPEIQEIVDKVKPQLEEKTNETYGKLEAVQYKTQVVAGTN |
| | YYIKVRAGDNKYMHLKVFNGP (SteA scaffold (SUC--) amino acid sequence) |
| 66 | MIPGGLSEAKPATPEIQEIVDKVKPQLEEKTNETYGKLEAVQYKTQVLASTNY |
| | YIKVRAGDNKYMHLKVFKSLPGQNEDLVLT |
| | (SteA scaffold (SUM-) amino acid sequence) |
| 67 | MIPGGLSEAKPATPEIQEIVDKVKPQLEEKTNETYGKLEAVQYKTQVLASTNY |
| | YIKVRAGDNKYMHLKVFKSL (SteA scaffold (SUM--) amino acid sequence) |
| 68 | MIPRGLSEAKPATPEIQEIVDKVKPQLEEKTNETYGKLEAVQYKTQVVAGTN |
| | YYIKVRAGDNKYMHLKVFKSLPGQNEDLVLT |
| | (SteA scaffold (SUN-) amino acid sequence) |
| 69 | MIPRGLSEAKPATPEIQEIVDKVKPQLEEKTNETYGKLEAVQYKTQVVAGTN |
| | YYIKVRAGDNKYMHLKVFKSL (SteA scaffold (SUN--) amino acid sequence) |
| 70 | MIPRGLSEAKPATPEIQEIVDKVKPQLEEKTNETYGKLEAVQYKTQVLASTNY |
| | YIKVRAGDNKYMHLKVFNGPPGQNADRVLTGYQVDKNKDDELTGF |
| | (SteA scaffold (SQT) amino acid sequence) |
| 71 | MIPRGLSEAKPATPEIQEIVDKVKPQLEEKTNETYGKLEAVQYKTQVLALAST |
| | NYYIKVRAGDNKYMHLKVFNGPPGQNADRVLTGYQVDKNKDDELTGF |
| | (SteA scaffold (SQL) amino acid sequence) |
| 72 | TCAAGCTTTTGGACCCTCGTACAGAAGCTAATACGACTCACTATAGGGAA |
| | ATAAGAGAGAAAAGAAGAGTAAGAAGAAATATAAGAGCCACC |
| | (5′ UTR) |
| 73 | TGATAATAGGCTGGAGCCTCGGTGGCCATGCTTCTTGCCCCTTGGGCCTCC |
| | CCCCAGCCCCTCCTCCCCTTCCTGCACCCGTACCCCCGTGGTCTTTGAATA |
| | AAGTCTGAGTGGGCGGC |
| | (3′ UTR) |
| 74 | ATGATCCCAAGAGAAGAACAGTGGGCACGCGAAATTGGAGCTCAACTCA |
| | GACGGATGGCCGACGACCTGAACGCCCAGTACGAGCGGCGGGGACTCTC |
| | AGAAGCGAAGCCTGCCACCCCCGAAATCCAGGAAATCGTCGACAAGGTC |
| | AAGCCGCAGCTTGAGGAAAAGACCAACGAGACTTACGGAAAACTGGAGG |
| | CCGTGCAGTATAAGACCCAAGTGTTGGCCTCCACCAACTACTACATTAAG |
| | GTCCGCGCCGGCGATAACAAGTACATGCACCTGAAGGTGTTCAATGGTCC |
| | TCCGGGACAGAACGCGGACAGGGTGCTGACTGGCTACCAAGTGGACAAG |
| | AACAAGGACGACGAGCTGACGGGCTTC |
| | (SQT-PUMA-BH3 mRNA sequence without epitope tag) |
| 75 | ATGATCCCAAGAGACATGCGCCCCGAAATTTGGATCGCCCAGGAGCTCAG |
| | ACGCATCGGAGATGAATTCAACGCATACTACGCTCGGCGGGGACTCTCAG |
| | AAGCGAAGCCTGCCACCCCCGAAATCCAGGAAATCGTCGACAAGGTCAA |
| | GCCGCAGCTTGAGGAAAAGACCAACGAGACTTACGGAAAACTGGAGGCC |
| | GTGCAGTATAAGACCCAAGTGTTGGCCTCCACCAACTACTACATTAAGGT |
| | CCGCGCCGGCGATAACAAGTACATGCACCTGAAGGTGTTCAATGGTCCTC |
| | CGGGACAGAACGCGGACAGGGTGCTGACTGGCTACCAAGTGGACAAGAA |
| | CAAGGACGACGAGCTGACGGGCTTC |
| | (SQT-BIM-BH3 mRNA sequence without epitope tag) |
| 76 | ATGATCCCAAGAAACCTGTGGGCTGCACAACGCTACGGAAGAGAACTGC |
| | GCCGGATGAGCGACGAATTTGTGGACTCGTTCAAGAAGGGGGGACTCTCA |
| | GAAGCGAAGCCTGCCACCCCCGAAATCCAGGAAATCGTCGACAAGGTCA |
| | AGCCGCAGCTTGAGGAAAAGACCAACGAGACTTACGGAAAACTGGAGGC |
| | CGTGCAGTATAAGACCCAAGTGTTGGCCTCCACCAACTACTACATTAAGG |
| | TCCGCGCCGGCGATAACAAGTACATGCACCTGAAGGTGTTCAATGGTCCT |
| | CCGGGACAGAACGCGGACAGGGTGCTGACTGGCTACCAAGTGGACAAGA |
| | ACAAGGACGACGAGCTGACGGGCTTC |
| | (SQT-BAD-BH3 mRNA sequence without epitope tag) |
| 77 | ATGATCCCAAGACCCGCAGAGCTCGAAGTGGAATGCGCTACCCAACTTAG |
| | ACGGTTCGGAGACAAGCTGAACTTTCGGCAGAAGCTCCTGGGACTCTCAG |
| | AAGCGAAGCCTGCCACCCCCGAAATCCAGGAAATCGTCGACAAGGTCAA |
| | GCCGCAGCTTGAGGAAAAGACCAACGAGACTTACGGAAAACTGGAGGCC |
| | GTGCAGTATAAGACCCAAGTGTTGGCCTCCACCAACTACTACATTAAGGT |
| | CCGCGCCGGCGATAACAAGTACATGCACCTGAAGGTGTTCAATGGTCCTC |
| | CGGGACAGAACGCGGACAGGGTGCTGACTGGCTACCAAGTGGACAAGAA |
| | CAAGGACGACGAGCTGACGGGCTTC |
| | (SQT-NoxA-BH3 mRNA sequence without epitope tag) |
| 78 | ATGATTCCTAATCCTCTCTTAGGGCTGGACGCAACACCCGCGTCCGCACCC |
| | GATACAAGAGCACTGGTTGCAGACTTCGTGGGCTACAAACTGAGGCAGA |
| | AGGGGTACGTCTGTGGTGCGGGCCCCGGTGAAGGGCCTGCCGCCGACCCT |
| | CTGCACCAGGCTATGCGAGCTGCAGGGGACGAGTTTGAGACACGCTTTAG |
| | ACGTACATTTTCTGATTTGGCGGCTCAGCTCCACGTCACCCCTGGGAGCGC |
| | TCAGCAGCGATTTACCCAAGTAAGCGACGAGCTCTTTCAAGGAGGCCCCA |
| | ATTGGGGCCGGCTGGTCGCGTTCTTTGTGTTTGGGGCCGCATTATGCGCGG |
| | AAAGCGTTAACAAAGAGATGGAACCCTTAGTAGGACAAGTCCAGGAATG |
| | GATGGTGGCCTACCTAGAGACACAGCTAGCTGACTGGATTCATTCATCAG |
| | GGGGCTGGGCCGAGTTTACTGCCTTATATGGGGATGGGGCACTCGAAGAA |
| | GCCAGGAGACTTCGCGAAGGGAATTGGGCATCAGTGAGGACTGTGCTAA |
| | CTGGAGCCGTCGCCCTGGGTGCCCTGGTTACCGTGGGTGCTTTCTTTGCGT |
| | CTAAA (Bcl-w wild-type mRNA sequence with V5 epitope tag) |
| 79 | ATGATTCCTAACCCCCTACTAGGACTTGACTCTCAGAGCAACAGAGAATT |
| | GGTAGTGGATTTTCTGAGTTATAAACTATCGCAGAAAGGCTACTCTTGGTC |
| | ACAGTTCTCAGATGTTGAGGAGAACAGGACTGAAGCACCAGAGGGGACA |
| | GAGTCTGAGATGGAGACCCCCAGTGCTATAAACGGTAACCCCTCCTGGCA |
| | CCTAGCCGATAGCCCCGCCGTGAACGGAGCCACCGGACACAGCAGCTCCT |
| | TAGATGCCCGCGAGGTGATTCCGATGGCCGCAGTAAAGCAGGCTCTCCGA |
| | GAAGCCGGCGATGAATTTGAGCTTAGGTATAGGAGGGCCTTCTCTGATCT |
| | TACTTCACAGCTTCACATCACACCTGGCACAGCTTATCAGAGCTTCGAAC |
| | AGGTGGTGAATGAACTTTTTCGAGATGGCGTAAACTGGGGCCGCATCGTG |
| | GCCTTCTTTAGCTTCGGTGGGGCCCTGTGCGTCGAATCAGTGGACAAAGA |
| | AATGCAAGTCCTGGTGAGCCGAATCGCAGCCTGGATGGCCACGTACTTGA |
| | ACGATCACCTGGAGCCTTGGATCCAAGAGAACGGCGGATGGGACACTTTC |
| | GTCGAGTTGTATGGCAATAATGCCGCTGCCGAAAGTCGGAAAGGGCAGG |
| | AGCGATTTAACCGCTGGTTCCTTACAGGCATGACTGTTGCTGGGGTGGTG |
| | CTCTTGGGTTCTCTCTTCAGCCGCAAA |
| | (Bcl-xL wild-type mRNA sequence with V5 epitope tag) |
| 80 | ATGGGACCACTCGGGTCGGAGGATGACCTGTATCGCCAATCCCTGGAAAT |
| | CATCTCTAGGTACCTGAGGGAGCAGGCCACCGGCTCGAAAGATAGTAAAC |
| | CACTTGGCGAAGCCGGAGCTGCTGGCAGAAGGGCTCTCGAGACACTCCGG |
| | CGCGTGGGTGATGGAGTGCAACGCAATCACGAGACTGCCTTCCAGGGCAT |
| | GCTCAGGAAGCTGGATATCAAAAACGAGGATGATGTTAAGAGTCTCTCTC |
| | GAGTCATGATTCATGTGTTTTCCGACGGTGTCACTAACTGGGGTAGAATTG |
| | TTACTCTGATAAGTTTTGGAGCATTCGTTGCCAAGCACTTGAAGACAATTA |
| | ACCAGGAGTCGTGCATCGAGCCCCTAGCGGAAAGCATCACAGATGTTCTC |
| | GTGCGAACCAAGCGCGATTGGCTGGTCAAGCAGAGGGGATGGGACGGGT |
| | TTGTTGAGTTTTTCCACGTCGAGGATCTGGAAGGGGGGGACTACAAGGAT |
| | GATGACGACAAG (Mcl-1 del.N/C mRNA sequence with FLAG epitope tag) |
| 81 | ATGATTCCCAATCCGCTCCTCGGGCTTGACGCTACACCAGCCAGTGCACC |
| | AGACACGAGGGCGCTGGTTGCCGATTTCGTGGGATACAAGCTCAGGCAAA |
| | AAGGGTACGTAAGCGGTGCCGGGCCCGGGGAGGGACCGGCTGCCGATCC |
| | ACTCCACCAGGCTATGAGGGCAGCTGGGGACGAATTCGAAACACGCTTTC |
| | GGCGGACTTTCTCCGACCTTGCCGCACAGCTACACGTCACTCCCGGGAGC |
| | GCTCAGCAGCGCTTCACGCAGGTCTCAGACGAATTGTTCCAAGGCGGCCC |
| | TAATTGGGGAAGATTGGTGGCCTTCTTCGTGTTTGGGGCAGCACTGTGCG |
| | CTGAGTCCGTGAACAAAGAAATGGAACCCCTCGTTGGCCAAGTCCAAGAA |
| | TGGATGGTGGAATATCTGGAAACACAGTTAGCGGATTGGATTCACTCATC |
| | TGGGGGCTGGGCTGAGTTTACAGCACTGTACGGGGACGGTGCCCTAGAGG |
| | AGGCCCGAAGACTGAGGGAAGGCAACTGGGCCAGCGTTCGCACGGTGTT |
| | GACCGGCGCGGTTGCTTTGGGCGCTTTGGTTACCGTCGGCGCATTCTTCGC |
| | CAGTAAA (Bcl-w (C29S/A128E)BH3 mRNA sequence with V5 epitope tag) |
| 82 | ATGGCACACGCTGGTAGGACAGGCTACGACAACCGTGAGATTGTGATGA |
| | AGTATATTCACTATAAGCTGTCTCAAAGAGGCTACGAATGGGATGCGGGG |
| | GCCGTCGGGGCTGCCCCACCTGGTGCCGCCCCGGCTCCTGGGATTTTCTCT |
| | TCCCAGCCGGGACATACCCCTCATCCTGCCGCTTCTAGGGACCCTGTGGC |
| | AAGAACATCCCCTCTACAGACCCCTGCCGCCCCAGGTGCGGCTGCTGGCC |
| | CAGCGTTAAGTCCCGTTCCACCAGTCGTGCACCTTACCCTTAGGCAAGC |
| | GGGCGACGATTTCTCTAGGCGATACCGGAGGGACTTTGCCGAAATGTCAT |
| | CACAGCTCCATCTTACTCCATTTACTGCCCGTGGCAGATTCGCCACCGTAG |
| | TGGAAGAACTCTTTCGAGACGGCGTAAATTGGGGGAGGATCGTGGCATTT |
| | TTCGAATTTGGAGGGGTTATGTGTGTGGAGAGCGTGAATCGGGAAATGTC |
| | TCCTCTGGTTGACAATATTGCCTTGTGGATGACCGAATATCTTAACAGGCA |
| | CCTCCACACCTGGATTCAAGATAATGGTGGATGGGATGCGTTTGTGGAA |
| | CTTTATGGGCCTTCAATGCGTGACTATAAGGACGACGACGACAAA |
| | (Bcl-2(D34A)del.C32 BH3 mRNA sequence with FLAG epitope tag) |
| 83 | ATGTCCCAGAGCAACAGGGAACTCGTAGTCGATTTCTTGTCCTACAAGCT |
| | CAGTCAGAAGGGCTACTCTTGGTCCCAATTTTCCGACGTGGAAGAAAATC |
| | GGACAGAAGCCCCTGAGGGAACCGAGAGTGAGATGGAGACCCCGTCTGC |
| | AATCAACGGGAACCCTTCTTGGCACTTGGCCGACAGTCCCGCTGTGAATG |
| | GCGCCACAGGTCACAGTTCATCACTCGACGCTAGAGAAGTTATACCCATG |
| | GCAGCAGTCAAGCAAGCTCTGCGGGAGGCCGGCGACGAGTTCGAACTTC |
| | GGTACCGCCGAGCTTTTTCTGACCTGACTAGTCAGCTGCATATTACTCCGG |
| | GCACTGCGTACCAGTCGTTCGAACAGGTGGTTAATGAACTATTTCGAGAC |
| | GGCGTGAATTGGGGCAGAATTGTAGCCTTTTTCTCCTTTGGAGGTGCACTG |
| | TGTGTCGAGAGCGTCGATAAGGAAATGCAGGTGTTGGTGAGCCGTATCGC |
| | GGCCTGGATGGCCACGTATCTGAACGACCATTTGGAACCATGGATCCAAG |
| | AAAACGGGGGTTGGGATACTTTCGTGGAGTTATATGGCAACAATGCTGCA |
| | GCGGAAAGTCGCAAGGGCCAGGAACGAGACTATAAAGATGACGACGATA |
| | AA (Bcl-xL del.C24 mRNA sequence with FLAG epitope tag) |
| 84 | ATGGGCTCTGATGAGCTGTACCGGCAGAGCCTCGAGATCATAAGCAGATA |
| | CCTGAGGGAACAAGCGACGGGGGCCAAGGATACTAAGCCCATGGGACGC |
| | TCCGGGGCAACGTCTCGCAAAGCCCTCGAGACCCTCAGAAGGGTCGGCGA |
| | TGGGGTACAGCGCAACCACGAGACTGCTTTCCAGGGCATGCTCCGAAAGC |
| | TGGACATCAAGAACGAAGACGATGTGAAGTCTCTTTCCCGTGTGATGATA |
| | CATGTGTTTTCTGATGGGGTTACCAACTGGGGACGCATTGTGACCCTTATT |
| | AGCTTCGGGGCGTTCGTCGCTAAGCACCTCAAGACAATCAATCAGGAAAG |
| | TTGTATTGAACCTTTAGCTGAGAGCATAACTGACGTCTTGGTCCGTACAAA |
| | GAGGGATTGGTTGGTCAAACAACGTGGTTGGGATGGTTTCGTAGAGTTCT |
| | TCCATGTCGAAGATCTTGAGGGAGGGGACTACAAAGATGACGATGATAA |
| | A (Mcl1 del.N/C(2010) mRNA sequence with FLAG epitope tag) |
| 85 | ATGAGCCAGTCTAACCGCGAACTTGTTGTGGACTTCCTTAGTTATAAACTC |
| | TCTCAGAAAGGGTATTCTTGGAGTCAGTTTTCTGATGTTGAAGAAAATCG |
| | GACTGAAGCTCCCGAGGGGACCGAAAGTGAGATGGAGACCCCAAGCGCA |
| | ATAAATGGCAACCCATCTTGGCATCTCGCCGCCTCTCCCGCAGTAAACGG |
| | AGCTACCGGTCACTCTTCTAGCCTGGACGCCCGGGAGGTGATACCCATGG |
| | CAGCCGTTAAGCAAGCCTTGCGGGAAGCAGGGGATGAGTTCGAACTTCGC |
| | TACAGGAGGGCATTTTCTGACCTCACCTCCCAGTTGCATATTACGCCAGG |
| | GACGGCATACCAGAGCTTTGAGCAAGTGGTCAATGAACTCTTTCGAGACG |
| | GAGTCAACTGGGGACGCATTGTAGCCTTCTTTTCATTTGGGGGCGCCCTGT |
| | GTGTGGAGTCTGTCGACAAGGAGATGCAGGTGCTCGTAAGCCGCATCGCC |
| | GCCTGGATGGCGACCTATCTTAATGATCACCTAGAACCTTGGATACAGGA |
| | GAATGGCGGATGGGACACCTTCGTTGAGCTGTACGGCAACAACGCGGCCG |
| | CAGAAAGCCGCAAGGGTCAAGAGAGGGATTATAAAGACGATGACGACAA |
| | A (Bcl-xL(D61A)del.C24 mRNA sequence with FLAG epitope tag) |
| 86 | ATGATTCCTCGAGGGCTATCAGAAGCTAAGCCTGCCACACCAGAGATTCA |
| | GGAGATCGTGGACAAGGTGAAGCCACAACTCGAGGAGAAAACCAACGAA |
| | ACATACGGCAAGCTCGAAGCTGTCCAGTATAAAACTCAGGTCTTAGATAT |
| | GCGACCAGAAATTTGGATTGCCCAGGAAGCTCGGCGCATCGGTGACGAG |
| | GCTAATGCCTATTATGCCAGAAGGGCAAGCACTAATTATTATATCAAAGT |
| | GCGAGCCGGAGATAATAAATACATGCACCTCAAGGTATTCAACGGACCCC |
| | CTGGGCAAAACGCTGACAGAGTCTTAACCGGATATCAGGTTGACAAAAAT |
| | AAGGACGACGAGCTTACCGGATTCGATTATAAAGATGATGACGACAAA |
| | (SQTanti-Mcl1.(L1)BimBH3.2A mRNA sequence with FLAG epitope tag) |
| 87 | ATGATACCTAGGGATATGAGGCCTGAGATTTGGATAGCACAGGAGGCAC |
| | GTAGGATAGGAGATGAAGCCAATGCATACTACGCCAGGCGCGGTCTGTCA |
| | GAGGCCAAACCGGCAACACCAGAGATCCAAGAAATTGTCGATAAAGTCA |
| | AGCCTCAGTTAGAGGAGAAGACTAATGAGACGTATGGCAAGCTCGAAGC |
| | AGTGCAATACAAGACTCAGGTCCTGGCTTCCACCAATTATTATATCAAAG |
| | TGCGCGCCGGCGACAACAAGTACATGCACCTTAAGGTTTTTAACGGCCCT |
| | CCAGGCCAGAATGCTGACCGTGTGCTGACAGGTTACCAGGTCGACAAGAA |
| | TAAGGACGATGAGTTGACCGGCTTCGACTATAAGGACGATGACGATAAA |
| | (SQTanti-Mcl1.(nt)BimBH3.2A mRNA sequence with FLAG epitope tag) |
| 88 | ATGATTCCTCGTGGCCTCTCTGAGGCCAAGCCTGCCACCCCCGAGATACA |
| | GGAAATCGTTGACAAAGTTAAACCTCAGCTCGAGGAAAAGACCAACGAG |
| | ACTTACGGAAAACTTGAGGCAGTGCAGTATAAGACTCAGGTCCTGAAAGC |
| | TCTCGAAACTCTGAGACGCGTGGGGGATGGTGTCCAGCGTAATCACGAGA |
| | CGGCCTTTGCAAGCACAAATTATTACATTAAGGTGCGAGCCGGCGATAAC |
| | AAATACATGCACCTCAAAGTGTTTAATGGACCGCCCGGCCAGAACGCCGA |
| | CCGCGTATTGACTGGGTACCAGGTAGACAAAAACAAGGATGACGAACTT |
| | ACAGGGTTCGACTACAAAGATGATGACGATAAG |
| | (SQT.(L1)Mcl1.BH3 mRNA sequence with FLAG epitope tag) |
| 89 | ATGATACCCCGGGGGCTTTCGGAGGCAAAGCCAGCTACCCCTGAAATCCA |
| | AGAAATCGTGGATAAGGTGAAACCTCAGCTGGAGGAGAAAACCAACGAA |
| | ACATACGGGAAACTGGAGGCAGTTCAATACAAAACACAGGTTTTGGCCA |
| | GCACTAATTATTACATCAAAGTGAGAGCGGGCGACAATAAGTATATGCAT |
| | TTGAAGGTGTTCAACGGGCCTAAGGCTCTCGAGACTCTACGGCGGGTCGG |
| | AGACGGCGTCCAGAGAAACCACGAGACTGCATTCCCTGGCCAGAACGCA |
| | GACCGTGTCCTGACTGGCTACCAGGTCGATAAAAACAAGGACGATGAGCT |
| | GACGGGATTCGACTATAAGGACGATGATGACAAA |
| | (SQT.(L2)Mcl1.BH3 mRNA sequence with FLAG epitope tag) |
| 90 | ATGATTCCAAGGGACATGAGACCAGAGATCTGGATTGCACAGGAGGCTA |
| | GGCGCATAGGAGATGAAGCAAATGCGTATTATGCACGACGCGGTCTTTCT |
| | GAAGCTAAGCCTGCGACGCCGGAGATTCAGGAGATAGTGGATAAAGTTA |
| | AACCTCAATTAGAGGAAAAGACCAATGAGACCTACGGCAAACTGGAAGC |
| | CGTGCAATATAAAACTCAGGTTCTGGCCTCCACTAACTATTATATCAAAGT |
| | GAGGGCAGGAGACAACAAGTACATGCACTTAAAGGTGTTCAATGGGCCC |
| | AACCTGTGGGCGGCCCAGCGCTACGGTCGCGAGCTACGAAGGATGTCTGA |
| | CGAGTTCGTTGACAGCTTCAAGAAGGGGCCTGGACAGAACGCCGATAGA |
| | GTGTTAACAGGCTATCAGGTCGATAAAAATAAAGATGACGAGCTAACCG |
| | GGTTTGATTACAAAGATGACGATGATAAG |
| | (biSQTanti-Bcl/Mcl1.(nt)BimBH2.2A.(L2)Bad mRNA sequence with FLAG |
| | epitope tag) |
| 91 | ATGATTCCCAGAGGCTTGAGTGAGGCTAAGCCCGCCACACCTGAGATCCA |
| | GGAAATCGTGGACAAGGTGAAACCCCAGCTGGAAGAAAAAACCAACGAG |
| | ACCTACGGCAAACTGGAGGCTGTCCAGTACAAAACTCAAGTCCTGGCCTC |
| | AACCAACTACTACATTAAAGTTAGAGCAGGCGATAATAAATACATGCACC |
| | TTAAAGTATTCAACGGTCCTGACATGCGACCTGAGATTTGGATAGCACAG |
| | GAAGCAAGAAGGATTGGGGATGAAGCTAATGCATATTACGCCCGCCGCC |
| | CGGGGCAGAATGCTGACCGTGTGCTGACCGGTTATCAGGTAGACAAGAAC |
| | AAAGACGACGAGCTAACAGGCTTCGACTACAAAGACGATGATGATAAG |
| | (SQTanti-Mcl1.(L2)BimBH3.2A mRNA sequence with FLAG epitope tag) |
| 92 | ATGGCAACACCCGCGTCCGCACCCGATACAAGAGCACTGGTTGCAGACTT |
| | CGTGGGCTACAAACTGAGGCAGAAGGGGTACGTCTGTGGTGCGGGCCCC |
| | GGTGAAGGGCCTGCCGCCGACCCTCTGCACCAGGCTATGCGAGCTGCAGG |
| | GGACGAGTTTGAGACACGCTTTAGACGTACATTTTCTGATTTGGCGGCTCA |
| | GCTCCACGTCACCCCTGGGAGCGCTCAGCAGCGATTTACCCAAGTAAGCG |
| | ACGAGCTCTTTCAAGGAGGCCCCAATTGGGGCCGGCTGGTCGCGTTCTTT |
| | GTGTTTGGGGCCGCATTATGCGCGGAAAGCGTTAACAAAGAGATGGA |
| | ACCCTTAGTAGGACAAGTCCAGGAATGGATGGTGGCCTACCTAGAGACAC |
| | AGCTAGCTGACTGGATTCATTCATCAGGGGGCTGGGCCGAGTTTACTGCC |
| | TTATATGGGGATGGGGCACTCGAAGAAGCCAGGAGACTTCGCGAAGGGA |
| | ATTGGGCATCAGTGAGGACTGTGCTAACTGGAGCCGTCGCCCTGGGTGCC |
| | CTGGTTACCGTGGGTGCTTTCTTTGCGTCTAAA |
| | (Bcl-w wild-type mRNA sequence without epitope tag) |
| 93 | ATGTCTCAGAGCAACAGAGAATTGGTAGTGGATTTTCTGAGTTATAAACT |
| | ATCGCAGAAAGGCTACTCTTGGTCACAGTTCTCAGATGTTGAGGAGAACA |
| | GGACTGAAGCACCAGAGGGGACAGAGTCTGAGATGGAGACCCCCAGTGC |
| | TATAAACGGTAACCCCTCCTGGCACCTAGCCGATAGCCCCGCCGTGAACG |
| | GAGCCACCGGACACAGCAGCTCCTTAGATGCCCGCGAGGTGATTCCGATG |
| | GCCGCAGTAAAGCAGGCTCTCCGAGAAGCCGGCGATGAATTTGAGCTTAG |
| | GTATAGGAGGGCCTTCTCTGATCTTACTTCACAGCTTCACATCACACCTG |
| | GCACAGCTTATCAGAGCTTCGAACAGGTGGTGAATGAACTTTTTCGAGAT |
| | GGCGTAAACTGGGGCCGCATCGTGGCCTTCTTTAGCTTCGGTGGGGCCCT |
| | GTGCGTCGAATCAGTGGACAAAGAAATGCAAGTCCTGGTGAGCCGAATC |
| | GCAGCCTGGATGGCCACGTACTTGAACGATCACCTGGAGCCTTGGATCCA |
| | AGAGAACGGCGGATGGGACACTTTCGTCGAGTTGTATGGCAATAATGCCG |
| | CTGCCGAAAGTCGGAAAGGGCAGGAGCGATTTAACCGCTGGTTCCTTACA |
| | GGCATGACTGTTGCTGGGGTGGTGCTCTTGGGTTCTCTCTTCAGCCGCAAA |
| | (Bcl-xL wild-type mRNA sequence without epitope tag) |
| 94 | ATGGGACCACTCGGGTCGGAGGATGACCTGTATCGCCAATCCCTGGAAAT |
| | CATCTCTAGGTACCTGAGGGAGCAGGCCACCGGCTCGAAAGATAGTAAAC |
| | CACTTGGCGAAGCCGGAGCTGCTGGCAGAAGGGCTCTCGAGACACTCCGG |
| | CGCGTGGGTGATGGAGTGCAACGCAATCACGAGACTGCCTTCCAGGGCAT |
| | GCTCAGGAAGCTGGATATCAAAAACGAGGATGATGTTAAGAGTCTCTCTC |
| | GAGTCATGATTCATGTGTTTTCCGACGGTGTCACTAACTGGGGTAGAATTG |
| | TTACTCTGATAAGTTTTGGAGCATTCGTTGCCAAGCACTTGAAGACAATTA |
| | ACCAGGAGTCGTGCATCGAGCCCCTAGCGGAAAGCATCACAGATGTTCTC |
| | GTGCGAACCAAGCGCGATTGGCTGGTCAAGCAGAGGGGATGGGACGGGT |
| | TTGTTGAGTTTTTCCACGTCGAGGATCTGGAAGGGGGG |
| | (Mcl-1 del.N/C mRNA sequence without epitope tag) |
| 95 | ATGGCTACACCAGCCAGTGCACCAGACACGAGGGCGCTGGTTGCCGATTT |
| | CGTGGGATACAAGCTCAGGCAAAAAGGGTACGTAAGCGGTGCCGGGCCC |
| | GGGGAGGGACCGGCTGCCGATCCACTCCACCAGGCTATGAGGGCAGCTG |
| | GGGACGAATTCGAAACACGCTTTCGGCGGACTTTCTCCGACCTTGCCGCA |
| | CAGCTACACGTCACTCCCGGGAGCGCTCAGCAGCGCTTCACGCAGGTCTC |
| | AGACGAATTGTTCCAAGGCGGCCCTAATTGGGGAAGATTGGTGGCCTTCT |
| | TCGTGTTTGGGGCAGCACTGTGCGCTGAGTCCGTGAACAAAGAAATGGAA |
| | CCCCTCGTTGGCCAAGTCCAAGAATGGATGGTGGAATATCTGGAAACACA |
| | GTTAGCGGATTGGATTCACTCATCTGGGGGCTGGGCTGAGTTTACAGCAC |
| | TGTACGGGGACGGTGCCCTAGAGGAGGCCCGAAGACTGAGGGAAGGCAA |
| | CTGGGCCAGCGTTCGCACGGTGTTGACCGGCGCGGTTGCTTTGGGCGCTTT |
| | GGTTACCGTCGGCGCATTCTTCGCCAGTAAA |
| | (Bcl-w (C29S/A128E)BH3 mRNA sequence without epitope tag) |
| 96 | ATGGCACACGCTGGTAGGACAGGCTACGACAACCGTGAGATTGTGATGA |
| | AGTATATTCACTATAAGCTGTCTCAAAGAGGCTACGAATGGGATGCGGGG |
| | GCCGTCGGGGCTGCCCCACCTGGTGCCGCCCCGGCTCCTGGGATTTTCTCT |
| | TCCCAGCCGGGACATACCCCTCATCCTGCCGCTTCTAGGGACCCTGTGGC |
| | AAGAACATCCCCTCTACAGACCCCTGCCGCCCCAGGTGCGGCTGCTGGCC |
| | CAGCGTTAAGTCCCGTTCCACCAGTCGTGCACCTTACCCTTAGGCAAGCG |
| | GGCGACGATTTCTCTAGGCGATACCGGAGGGACTTTGCCGAAATGT |
| | CATCACAGCTCCATCTTACTCCATTTACTGCCCGTGGCAGATTCGCCACCG |
| | TAGTGGAAGAACTCTTTCGAGACGGCGTAAATTGGGGGAGGATCGTGGCA |
| | TTTTTCGAATTTGGAGGGGTTATGTGTGTGGAGAGCGTGAATCGGGAAAT |
| | GTCTCCTCTGGTTGACAATATTGCCTTGTGGATGACCGAATATCTTAACAG |
| | GCACCTCCACACCTGGATTCAAGATAATGGTGGATGGGATGCGTTTGTGG |
| | AACTTTATGGGCCTTCAATGCGT |
| | (Bcl-2(D34A)del.C32 BH3 mRNA sequence without epitope tag) |
| 97 | ATGTCCCAGAGCAACAGGGAACTCGTAGTCGATTTCTTGTCCTACAAGCT |
| | CAGTCAGAAGGGCTACTCTTGGTCCCAATTTTCCGACGTGGAAGAAAATC |
| | GGACAGAAGCCCCTGAGGGAACCGAGAGTGAGATGGAGACCCCGTCTGC |
| | AATCAACGGGAACCCTTCTTGGCACTTGGCCGACAGTCCCGCTGTGAATG |
| | GCGCCACAGGTCACAGTTCATCACTCGACGCTAGAGAAGTTATACCCATG |
| | GCAGCAGTCAAGCAAGCTCTGCGGGAGGCCGGCGACGAGTTCGAACTTC |
| | GGTACCGCCGAGCTTTTTCTGACCTGACTAGTCAGCTGCATATTACTCC |
| | GGGCACTGCGTACCAGTCGTTCGAACAGGTGGTTAATGAACTATTTCGAG |
| | ACGGCGTGAATTGGGGCAGAATTGTAGCCTTTTTCTCCTTTGGAGGTGCAC |
| | TGTGTGTCGAGAGCGTCGATAAGGAAATGCAGGTGTTGGTGAGCCGTATC |
| | GCGGCCTGGATGGCCACGTATCTGAACGACCATTTGGAACCATGGATCCA |
| | AGAAAACGGGGGTTGGGATACTTTCGTGGAGTTATATGGCAACAATGCTG |
| | CAGCGGAAAGTCGCAAGGGCCAGGAACGA |
| | (Bcl-xL del.C24 mRNA sequence without epitope tag) |
| 98 | ATGGGCTCTGATGAGCTGTACCGGCAGAGCCTCGAGATCATAAGCAGATA |
| | CCTGAGGGAACAAGCGACGGGGGCCAAGGATACTAAGCCCATGGGACGC |
| | TCCGGGGCAACGTCTCGCAAAGCCCTCGAGACCCTCAGAAGGGTCGGCGA |
| | TGGGGTACAGCGCAACCACGAGACTGCTTTCCAGGGCATGCTCCGAAAGC |
| | TGGACATCAAGAACGAAGACGATGTGAAGTCTCTTTCCCGTGTGATGATA |
| | CATGTGTTTTCTGATGGGGTTACCAACTGGGGACGCATTGTGACCCTTATT |
| | AGCTTCGGGGCGTTCGTCGCTAAGCACCTCAAGACAATCAATCAGGAAAG |
| | TTGTATTGAACCTTTAGCTGAGAGCATAACTGACGTCTTGGTCCGTACAAA |
| | GAGGGATTGGTTGGTCAAACAACGTGGTTGGGATGGTTTCGTAGAGTTCT |
| | TCCATGTCGAAGATCTTGAGGGAGGG |
| | (Mcl1 del.N/C(2010) mRNA sequence without epitope tag) |
| 99 | ATGAGCCAGTCTAACCGCGAACTTGTTGTGGACTTCCTTAGTTATAAACTC |
| | TCTCAGAAAGGGTATTCTTGGAGTCAGTTTTCTGATGTTGAAGAAAATCG |
| | GACTGAAGCTCCCGAGGGGACCGAAAGTGAGATGGAGACCCCAAGCGCA |
| | ATAAATGGCAACCCATCTTGGCATCTCGCCGCCTCTCCCGCAGTAAACGG |
| | AGCTACCGGTCACTCTTCTAGCCTGGACGCCCGGGAGGTGATACCCATGG |
| | CAGCCGTTAAGCAAGCCTTGCGGGAAGCAGGGGATGAGTTCGAACTTCGC |
| | TACAGGAGGGCATTTTCTGACCTCACCTCCCAGTTGCATATTACGCCAGG |
| | GACGGCATACCAGAGCTTTGAGCAAGTGGTCAATGAACTCTTTCGAGACG |
| | GAGTCAACTGGGGACGCATTGTAGCCTTCTTTTCATTTGGGGGCGCCCTGT |
| | GTGTGGAGTCTGTCGACAAGGAGATGCAGGTGCTCGTAAGCCGCATCGCC |
| | GCCTGGATGGCGACCTATCTTAATGATCACCTAGAACCTTGGATACAGGA |
| | GAATGGCGGATGGGACACCTTCGTTGAGCTGTACGGCAACAACGCGGCCG |
| | CAGAAAGCCGCAAGGGTCAAGAGAGG |
| | (Bcl-xL(D61A)del.C24 mRNA sequence without epitope tag) |
| 100 | ATGATTCCTCGAGGGCTATCAGAAGCTAAGCCTGCCACACCAGAGATTCA |
| | GGAGATCGTGGACAAGGTGAAGCCACAACTCGAGGAGAAAACCAACGAA |
| | ACATACGGCAAGCTCGAAGCTGTCCAGTATAAAACTCAGGTCTTAGATAT |
| | GCGACCAGAAATTTGGATTGCCCAGGAAGCTCGGCGCATCGGTGACGAG |
| | GCTAATGCCTATTATGCCAGAAGGGCAAGCACTAATTATTATATCAAAGT |
| | GCGAGCCGGAGATAATAAATACATGCACCTCAAGGTATTCAACGGACCCC |
| | CTGGGCAAAACGCTGACAGAGTCTTAACCGGATATCAGGTTGACAAAAAT |
| | AAGGACGACGAGCTTACCGGATTC |
| | (SQTanti-Mcl1.(L1)BimBH3.2A mRNA sequence without epitope tag) |
| 101 | ATGATACCTAGGGATATGAGGCCTGAGATTTGGATAGCACAGGAGGCAC |
| | GTAGGATAGGAGATGAAGCCAATGCATACTACGCCAGGCGCGGTCTGTCA |
| | GAGGCCAAACCGGCAACACCAGAGATCCAAGAAATTGTCGATAAAGTCA |
| | AGCCTCAGTTAGAGGAGAAGACTAATGAGACGTATGGCAAGCTCGAAGC |
| | AGTGCAATACAAGACTCAGGTCCTGGCTTCCACCAATTATTATATCAAAG |
| | TGCGCGCCGGCGACAACAAGTACATGCACCTTAAGGTTTTTAACGGCCCT |
| | CCAGGCCAGAATGCTGACCGTGTGCTGACAGGTTACCAGGTCGACAAGAA |
| | TAAGGACGATGAGTTGACCGGCTTC |
| | (SQTanti-Mcl1.(nt)BimBH3.2A mRNA sequence without epitope tag) |
| 102 | ATGATTCCTCGTGGCCTCTCTGAGGCCAAGCCTGCCACCCCCGAGATACA |
| | GGAAATCGTTGACAAAGTTAAACCTCAGCTCGAGGAAAAGACCAACGAG |
| | ACTTACGGAAAACTTGAGGCAGTGCAGTATAAGACTCAGGTCCTGAAAGC |
| | TCTCGAAACTCTGAGACGCGTGGGGGATGGTGTCCAGCGTAATCACGAGA |
| | CGGCCTTTGCAAGCACAAATTATTACATTAAGGTGCGAGCCGGCGATAAC |
| | AAATACATGCACCTCAAAGTGTTTAATGGACCGCCCGGCCAGAACGCCGA |
| | CCGCGTATTGACTGGGTACCAGGTAGACAAAAACAAGGATGACGAACTT |
| | ACAGGGTTC (SQT.(L1)Mcl1.BH3 mRNA sequence without epitope tag) |
| 103 | ATGATACCCCGGGGGCTTTCGGAGGCAAAGCCAGCTACCCCTGAAATCCA |
| | AGAAATCGTGGATAAGGTGAAACCTCAGCTGGAGGAGAAAACCAACGAA |
| | ACATACGGGAAACTGGAGGCAGTTCAATACAAAACACAGGTTTTGGCCA |
| | GCACTAATTATTACATCAAAGTGAGAGCGGGCGACAATAAGTATATGCAT |
| | TTGAAGGTGTTCAACGGGCCTAAGGCTCTCGAGACTCTACGGCGGGTCGG |
| | AGACGGCGTCCAGAGAAACCACGAGACTGCATTCCCTGGCCAGAACGCA |
| | GACCGTGTCCTGACTGGCTACCAGGTCGATAAAAACAAGGACGATGAGCT |
| | GACGGGATTC (SQT.(L2)Mcl1.BH3 mRNA sequence without epitope tag) |
| 104 | ATGATTCCAAGGGACATGAGACCAGAGATCTGGATTGCACAGGAGGCTA |
| | GGCGCATAGGAGATGAAGCAAATGCGTATTATGCACGACGCGGTCTTTCT |
| | GAAGCTAAGCCTGCGACGCCGGAGATTCAGGAGATAGTGGATAAAGTTA |
| | AACCTCAATTAGAGGAAAAGACCAATGAGACCTACGGCAAACTGGAAGC |
| | CGTGCAATATAAAACTCAGGTTCTGGCCTCCACTAACTATTATATCAAAGT |
| | GAGGGCAGGAGACAACAAGTACATGCACTTAAAGGTGTTCAATGGGCCC |
| | AACCTGTGGGCGGCCCAGCGCTACGGTCGCGAGCTACGAAGGATGTCTGA |
| | CGAGTTCGTTGACAGCTTCAAGAAGGGGCCTGGACAGAACGCCGATAGA |
| | GTGTTAACAGGCTATCAGGTCGATAAAAATAAAGATGACGAGCTAACCG |
| | GGTTT |
| | (biSQTanti-Bcl/Mcl1.(nt)BimBH2.2A.(L2)Bad mRNA sequence without |
| | epitope tag) |
| 105 | ATGATTCCCAGAGGCTTGAGTGAGGCTAAGCCCGCCACACCTGAGATCCA |
| | GGAAATCGTGGACAAGGTGAAACCCCAGCTGGAAGAAAAAACCAACGAG |
| | ACCTACGGCAAACTGGAGGCTGTCCAGTACAAAACTCAAGTCCTGGCCTC |
| | AACCAACTACTACATTAAAGTTAGAGCAGGCGATAATAAATACATGCACC |
| | TTAAAGTATTCAACGGTCCTGACATGCACCTGAGATTTGGATAGCACAGG |
| | AAGCAAGAAGGATTGGGGATGAAGCTAATGCATATTACGCCCGCCGCCC |
| | GGGGCAGAATGCTGACCGTGTGCTGACCGGTTATCAGGTAGACAAGAAC |
| | AAAGACGACGAGCTAACAGGCTTC |
| | (SQTanti-Mcl1.(L2)BimBH3.2A mRNA sequence without epitope tag) |
| 106 | UCAACAUCAGUCUGAUAAGCUA |
| | (miR-21 sequence) |
| 107 | MIPRDMRPEIWIAQEARRIGDEANAYYARRGLSEAKPATPEIQEIVDKVKPQL |
| | EEKTNETYGKLEAVQYKTQVLASTNYYIKVRAGDNKYMHLKVFNGPPGQN |
| | ADRVLTGYQVDKNKDDELTGFGKPIPNPLLGLDST |
| | (SQTanti-Mcl1.(nt)BimBH3.2A.v5) |
| 108 | MDMRPEIWIAQEARRIGDEANAYYARRGSGVKQTLNFDLLKLAGDVESNPG |
| | PDMRPEIWIAQEARRIGDEANAYYARRGSGVKQTLNFDLLKLAGDVESNPGP |
| | DMRPEIWIAQEARRIGDEANAYYARRGKPIPNPLLGLDST |
| | (BimBH3.2A(x3.F2A).v5_miR122) |
| 109 | MIPRKALETLRRVGDGVQRNHETAFGLSEAKPATPEIQEIVDKVKPQLEEKTN |
| | ETYGKLEAVQYKTQVLASTNYYIKVRAGDNKYMHLKVFNGPPGQNADRVL |
| | TGYQVDKNKDDELTGFGKPIPNPLLGLDST |
| | (SQT.(nt)Mcl1.BH3.cv5) |
| 110 | MKALETLRRVGDGVQRNHETAFGSGVKQTLNFDLLKLAGDVESNPGPKALE |
| | TLRRVGDGVQRNHETAFGSGVKQTLNFDLLKLAGDVESNPGPKALETLRRV |
| | GDGVQRNHETAFGKPIPNPLLGLDST |
| | (Mcl1.BH3(x3.F2A).cV5) |
| 111 | MRPEIWMTQGLRRLGDEINAYYARGSGVKQTLNFDLLKLAGDVESNPGPRP |
| | EIWMTQGLRRLGDEINAYYARGSGVKQTLNFDLLKLAGDVESNPGPRPEIW |
| | MTQGLRRLGDEINAYYARGKPIPNPLLGLDST |
| | (antiMcl1.MS1(x3.F2A).cV5) |
| 112 | MRPEIWLTQSLQRLGDEINAYYARGSGVKQTLNFDLLKLAGDVESNPGPRPEI |
| | WLTQSLQRLGDEINAYYARGSGVKQTLNFDLLKLAGDVESNPGPRPEIWLTQ |
| | SLQRLGDEINAYYARGKPIPNPLLGLDST |
| | (antiMcl1.MS2(x3.F2A).cV5) |
| 113 | MRPEIWLTQHLQRLGDEINAYYARGSGVKQTLNFDLLKLAGDVESNPGPRPE |
| | IWLTQHLQRLGDEINAYYARGSGVKQTLNFDLLKLAGDVESNPGPRPEIWLT |
| | QHLQRLGDEINAYYARGKPIPNPLLGLDST |
| | (antiMcl1.MS3(x3.F2A).cV5) |
| 114 | MDFSVLQTIGDSLGSGVKQTLNFDLLKLAGDVESNPGPDFSVLQTIGDSLGSG |
| | VKQTLNFDLLKLAGDVESNPGPDFSVLQTIGDSLGKPIPNPLLGLDST |
| | (antiMcl1.SB-02(x3.F2A).cV5) |
| 115 | MNETVNTMLTYYYGSGVKQTLNFDLLKLAGDVESNPGPNETVNTMLTYYY |
| | GSGVKQTLNFDLLKLAGDVESNPGPNETVNTMLTYYYGKPIPNPLLGLDST |
| | (antiMcl1.SB-03(x3.F2A).cV5) |
| 116 | MNETVELMQAYLHGSGVKQTLNFDLLKLAGDVESNPGPNETVELMQAYLH |
| | GSGVKQTLNFDLLKLAGDVESNPGPNETVELMQAYLHGKPIPNPLLGLDST |
| | (antiMcl1.SB-04(x3.F2A).cV5) |
| 117 | MIPRDMRPEIWIAQEARRIGDEANAYYARRGLSEAKPATPEIQEIVDKVKPQL |
| | EEKTNETYGKLEAVQYKTQVLASTNYYIKVRAGDNKYMHLKVFNGPPGQN |
| | ADRVLTGYQVDKNKDDELTGF |
| | (SQTanti-Mcl1.(nt)BimBH3.2A without v5 tag) |
| 118 | MDMRPEIWIAQEARRIGDEANAYYARRGSGVKQTLNFDLLKLAGDVESNPG |
| | PDMRPEIWIAQEARRIGDEANAYYARRGSGVKQTLNFDLLKLAGDVESNPGP |
| | DMRPEIWIAQEARRIGDEANAYYARR |
| | (BimBH3.2A(x3.F2A)_miR122 without v5 tag) |
| 119 | MIPRKALETLRRVGDGVQRNHETAFGLSEAKPATPEIQEIVDKVKPQLEEKTN |
| | ETYGKLEAVQYKTQVLASTNYYIKVRAGDNKYMHLKVFNGPPGQNADRVL |
| | TGYQVDKNKDDELTGF (SQT.(nt)Mcl1.BH3 without v5 tag) |
| 120 | MKALETLRRVGDGVQRNHETAFGSGVKQTLNFDLLKLAGDVESNPGPKALE |
| | TLRRVGDGVQRNHETAFGSGVKQTLNFDLLKLAGDVESNPGPKALETLRRV |
| | GDGVQRNHETAF (Mcl1.BH3(x3.F2A) without v5 tag) |
| 121 | MRPEIWMTQGLRRLGDEINAYYARGSGVKQTLNFDLLKLAGDVESNPGPRP |
| | EIWMTQGLRRLGDEINAYYARGSGVKQTLNFDLLKLAGDVESNPGPRPEIW |
| | MTQGLRRLGDEINAYYAR |
| | (antiMcl1.MS1(x3.F2A) without v5 tag) |
| 122 | MRPEIWLTQSLQRLGDEINAYYARGSGVKQTLNFDLLKLAGDVESNPGPRPEI |
| | WLTQSLQRLGDEINAYYARGSGVKQTLNFDLLKLAGDVESNPGPRPEIWLTQ |
| | SLQRLGDEINAYYAR |
| | (antiMcl1.MS2(x3.F2A) without v5 tag) |
| 123 | MRPEIWLTQHLQRLGDEINAYYARGSGVKQTLNFDLLKLAGDVESNPGPRPE |
| | IWLTQHLQRLGDEINAYYARGSGVKQTLNFDLLKLAGDVESNPGPRPEIWLT |
| | QHLQRLGDEINAYYAR |
| | (antiMcl1.MS3(x3.F2A) without v5 tag) |
| 124 | MDFSVLQTIGDSLGSGVKQTLNFDLLKLAGDVESNPGPDFSVLQTIGDSLGSG |
| | VKQTLNFDLLKLAGDVESNPGPDFSVLQTIGDSL |
| | (antiMcl1.SB-02(x3.F2A) without v5 tag) |
| 125 | MNETVNTMLTYYYGSGVKQTLNFDLLKLAGDVESNPGPNETVNTMLTYYY |
| | GSGVKQTLNFDLLKLAGDVESNPGPNETVNTMLTYYY |
| | (antiMcl1.SB-03(x3.F2A) without v5 tag) |
| 126 | MNETVELMQAYLHGSGVKQTLNFDLLKLAGDVESNPGPNETVELMQAYLH |
| | GSGVKQTLNFDLLKLAGDVESNPGPNETVELMQAYLH |
| | (antiMcl1.SB-04(x3.F2A) without v5 tag) |
| 127 | ATGATCCCAAGAGATATGCGCCCTGAAATCTGGATTGCACAAGAAGCCCG |
| | GAGGATTGGAGATGAGGCGAACGCCTACTACGCCCGGAGAGGCCTGTCG |
| | GAAGCTAAACCGGCCACCCCCGAGATCCAGGAGATCGTGGATAAGGTCA |
| | AGCCCCAGCTTGAAGAAAAGACTAACGAAACCTATGGGAAGCTGGAGGC |
| | CGTGCAGTACAAGACTCAAGTGCTCGCGTCCACCAACTACTACATCAAGG |
| | TCCGCGCCGGCGACAACAAGTACATGCACTTGAAAGTGTTCAATGGCCCG |
| | CCGGGACAGAACGCCGACCGGGTGCTGACTGGATACCAGGTCGACAAGA |
| | ACAAGGACGACGAGCTGACCGGATTCGGGAAGCCTATTCCCAACCCTCTC |
| | CTGGGTCTGGACAGCACC |
| | (SQTanti-Mcl1.(nt)BimBH3.2A.v5) |
| 128 | ATGGACATGAGGCCCGAGATTTGGATCGCTCAGGAAGCACGCAGGATCG |
| | GCGACGAGGCCAACGCATACTACGCCCGGCGCGGCTCCGGAGTGAAGCA |
| | GACCCTGAATTTCGACTTGCTCAAGCTGGCCGGCGACGTGGAATCGAACC |
| | CAGGTCCCGACATGCGCCCCGAGATCTGGATCGCCCAAGAAGCACGGCG |
| | GATCGGAGATGAGGCCAACGCCTACTATGCGCGGAGAGGAAGCGGGGTC |
| | AAGCAGACTCTTAACTTCGACCTCCTGAAACTGGCCGGAGATGTGGAGTC |
| | AAACCCTGGACCGGACATGCGGCCGGAAATCTGGATTGCTCAGGAGGCA |
| | CGCAGAATCGGCGATGAAGCCAACGCGTACTACGCCAGACGGGGGAAGC |
| | CTATTCCGAACCCTCTGCTGGGTCTGGACTCCACC |
| | (BimBH3.2A(x3.F2A).v5_miR122) |
| 129 | ATGATCCCTAGGAAGGCCCTGGAGACCCTGAGGAGAGTGGGCGACGGAG |
| | TGCAGAGGAACCACGAGACCGCCTTCGGCCTGAGCGAGGCAAAGCCAGC |
| | AACACCCGAGATCCAGGAGATCGTGGATAAGGTGAAGCCCCAGCTGGAG |
| | GAGAAGACCAATGAGACATACGGCAAGCTGGAGGCCGTGCAGTATAAGA |
| | CCCAGGTGCTGGCCTCCACAAACTACTATATCAAGGTGCGGGCCGGCGAC |
| | AATAAGTACATGCACCTGAAGGTGTTCAACGGACCACCTGGACAGAATGC |
| | AGACAGGGTGCTGACCGGCTATCAGGTGGATAAGAACAAGGACGATGAG |
| | CTGACAGGCTTTGGCAAGCCAATCCCCAATCCTCTGCTGGGCCTGGATTCT |
| | ACA |
| | (SQT.(nt)Mcl1.BH3.cv5) |
| 130 | ATGAAGGCCCTGGAGACCCTGAGGAGAGTGGGCGACGGCGTGCAGAGGA |
| | ACCACGAGACCGCCTTCGGCAGCGGAGTGAAGCAGACACTGAACTTTGAC |
| | CTGCTGAAGCTGGCAGGCGATGTGGAGTCCAATCCAGGACCTAAGGCCCT |
| | GGAGACACTGAGGAGGGTGGGCGATGGAGTGCAGAGGAATCATGAAACC |
| | GCCTTCGGCTCTGGCGTCAAACAGACACTGAACTTCGACCTGCTGAAGCT |
| | GGCCGGCGATGTGGAGAGCAATCCAGGACCAAAGGCCCTGGAGACCCTG |
| | CGCAGAGTGGGCGACGGAGTCCAGAGAAACCACGAGACAGCCTTCGGCA |
| | AGCCTATCCCAAATCCCCTGCTGGGCCTGGATAGCACC |
| | (Mcl1.BH3(x3.F2A).cV5) |
| 131 | ATGAGGCCCGAGATCTGGATGACCCAGGGACTGCGGAGACTGGGCGACG |
| | AGATCAACGCCTACTATGCAAGGGGCAGCGGAGTGAAGCAGACACTGAA |
| | CTTCGACCTGCTGAAGCTGGCAGGCGATGTGGAGTCCAATCCAGGACCTC |
| | GGCCAGAAATTTGGATGACTCAGGGCCTGAGGCGCCTGGGCGATGAGATC |
| | AATGCCTACTATGCCAGAGGCTCTGGCGTCAAACAGACACTGAACTTTGA |
| | CCTGCTGAAGCTGGCCGGCGATGTGGAGAGCAATCCAGGACCTAGGCCA |
| | GAAATCTGGATGACTCAGGGGTTACGGAGACTGGGCGACGAGATCAACG |
| | CGTACTATGCCCGGGGCAAGCCCATCCCTAATCCACTGCTGGGCCTGGAT |
| | AGCACA |
| | (antiMcl1.MS1(x3.F2A).cV5) |
| 132 | ATGCGGCCCGAGATCTGGCTGACCCAGTCCCTGCAGAGACTGGGCGACGA |
| | GATCAACGCCTACTATGCCAGGGGCTCTGGCGTGAAGCAGACACTGAACT |
| | TCGACCTGCTGAAGCTGGCAGGCGATGTGGAGAGCAATCCAGGACCTAG |
| | GCCAGAAATTTGGCTGACTCAGAGCCTGCAGCGGCTGGGCGATGAGATCA |
| | ATGCCTACTATGCCAGAGGCAGCGGAGTCAAGCAGACACTGAACTTTGAC |
| | CTGCTGAAGCTGGCCGGCGATGTGGAGTCTAATCCCGGCCCTAGGCCAGA |
| | AATCTGGCTGACTCAGTCCCTGCAGCGCCTGGGCGACGAGATCAACGCGT |
| | ACTATGCCCGGGGCAAGCCCATCCCTAATCCACTGCTGGGCCTGGATTCC |
| | ACA |
| | (antiMcl1.MS2(x3.F2A).cV5) |
| 133 | ATGCGGCCCGAGATCTGGCTGACCCAGCACCTGCAGAGACTGGGCGACG |
| | AGATCAACGCCTACTATGCCAGGGGCAGCGGCGTGAAGCAGACACTGAA |
| | CTTCGACCTGCTGAAGCTGGCAGGCGATGTGGAGTCCAATCCAGGACCTA |
| | GGCCAGAAATTTGGCTGACTCAGCACCTGCAGCGGCTGGGCGATGAGATC |
| | AATGCCTACTATGCCAGAGGCTCTGGAGTCAAGCAGACACTGAACTTTGA |
| | CCTGCTGAAGCTGGCCGGCGATGTGGAGAGTAACCCAGGACCTAGGCCA |
| | GAGATTTGGTTAACTCAACACCTGCAGCGCCTGGGCGACGAGATCAACGC |
| | GTACTATGCCCGGGGCAAGCCCATCCCTAATCCACTGCTGGGCCTGGATA |
| | GCACA |
| | (antiMcl1.MS3(x3.F2A).cV5) |
| 134 | ATGGACTTCTCCGTGCTGCAGACCATCGGCGATAGCCTGGGCTCCGGCGT |
| | GAAGCAGACACTGAACTTCGACCTGCTGAAGCTGGCAGGCGATGTGGAGT |
| | CCAATCCAGGACCTGACTTTTCTGTGCTGCAGACTATTGGCGATTCTCTGG |
| | GCAGCGGAGTCAAACAGACACTGAACTTTGACCTGCTGAAGCTGGCCGGC |
| | GATGTGGAGAGCAATCCAGGCCCCGACTTTTCCGTGCTGCAAACTATTGG |
| | CGATTCCCTGGGCAAGCCTATCCCAAACCCCCTGCTGGGCCTGGACAGCA |
| | CA |
| | (antiMcl1.SB-02(x3.F2A).cV5) |
| 135 | ATGAACGAGACCGTGAATACAATGCTGACCTACTATTACGGCAGCGGCGT |
| | GAAGCAGACACTGAACTTCGACCTGCTGAAGCTGGCAGGCGATGTGGAG |
| | AGCAACCCAGGACCTAATGAGACAGTGAACACCATGCTGACATATTACTA |
| | TGGCTCCGGCGTGAAGCAGACCCTGAACTTTGACCTGCTGAAGCTGGCCG |
| | GCGATGTGGAGTCTAATCCAGGCCCCAATGAAACTGTCAACACCATGCTG |
| | ACTTATTATTACGGCAAGCCTATCCCAAATCCCCTGCTGGGCCTGGACAG |
| | CACA |
| | (antiMcl1.SB-03(x3.F2A).cV5) |
| 136 | ATGAACGAGACCGTGGAGCTGATGCAGGCCTACCTGCACGGCAGCGGCG |
| | TGAAGCAGACACTGAATTTCGACCTGCTGAAGCTGGCAGGCGATGTGGAG |
| | AGCAACCCAGGACCTAATGAAACTGTCGAACTGATGCAGGCCTATCTGCA |
| | CGGCTCCGGAGTCAAGCAGACACTGAACTTTGACCTGCTGAAGCTGGCCG |
| | GCGATGTGGAGTCTAACCCAGGCCCCAATGAAACTGTCGAGCTGATGCAG |
| | GCTTACCTGCACGGCAAGCCTATCCCAAATCCCCTGCTGGGCCTGGACAG |
| | CACA |
| | (antiMcl1.SB-04(x3.F2A).cV5) |
| 137 | DMRPEIWIAQEARRIGDEANAYYARR |
| | (BimBH3.2A) |
| 138 | GSGVKQTLNFDLLKLAGDVESNPGP |
| | (F2A linker sequence) |
| 139 | GSGEGRGSLLTCGDVEENPGP |
| | (T2A linker sequence) |
| 140 | GSGATNFSLLKQAGDVEENPGP |
| | (P2A linker sequence) |
| 141 | GSGQCTNYALLKLAGDVESNPGP |
| | (E2A linker sequence) |
| 142 | MEEQWAREIGAQLRRMADDLNAQYERR |
| | (PumaBH3_HS3UPCRfree) |
| 143 | MHHHHHHEEQWAREIGAQLRRMADDLNAQYERR |
| | (PumaBH3.nHIS_HS3UPCRfree) |
| 144 | MGKPIPNPLLGLDSTEEQWAREIGAQLRRMADDLNAQYERR |
| | (PumaBH3.nV5_HS3UPCRfree) |
| 145 | MEEQWAREIGAQLRRMADDLNAQYERRHHHHHH |
| | (PumaBH3.cHIS_HS3UPCRfree) |
| 146 | MEEQWAREIGAQLRRMADDLNAQYERRGSGVKQTLNFDLLKLAGDVESNP |
| | GPEEQWAREIGAQLRRMADDLNAQYERRGSGVKQTLNFDLLKLAGDVESNP |
| | GPEEQWAREIGAQLRRMADDLNAQYERRGKPIPNPLLGLDST |
| | (PumaBH3(x3.F2A).v5_Hs3UPCRfree) |
| 147 | MEEQWAREIGAQLRRMADDLNAQYERRGKPIPNPLLGLDST |
| | (PumaBH3.cV5_HS3UPCRfree) |
| 148 | MEEQWAREIGAQLRRMADDLNAQYERRGSGVKQTLNFDLLKLAGDVESNP |
| | GPEEQWAREIGAQLRRMADDLNAQYERRGSGVKQTLNFDLLKLAGDVESNP |
| | GPEEQWAREIGAQLRRMADDLNAQYERRGKPIPNPLLGLDST |
| | (PumaBH3(x3.F2A).v5_miR142.3p_tp) |
| 149 | MEEQWAREIGAQLRRMADDLNAQYERRGSGVKQTLNFDLLKLAGDVESNP |
| | GPEEQWAREIGAQLRRMADDLNAQYERRGSGVKQTLNFDLLKLAGDVESNP |
| | GPEEQWAREIGAQLRRMADDLNAQYERRGKPIPNPLLGLDST |
| | (PumaBH3(x3.F2A).v5_miR122/142.3p_tp) |
| 150 | MEEQWAREIGAQLRRMADDLNAQYERRGSGVKQTLNFDLLKLAGDVESNP |
| | GPEEQWAREIGAQLRRMADDLNAQYERRGSGVKQTLNFDLLKLAGDVESNP |
| | GPEEQWAREIGAQLRRMADDLNAQYERRGKPIPNPLLGLDST |
| | (PumaBH3(x3.F2A).v5_tp) |
| 151 | MEEQWAREIGAQLRRMADDLNAQYERRGSGVKQTLNFDLLKLAGDVESNP |
| | GPEEQWAREIGAQLRRMADDLNAQYERRGSGVKQTLNFDLLKLAGDVESNP |
| | GPEEQWAREIGAQLRRMADDLNAQYERRGKPIPNPLLGLDST |
| | (PumaBH3(x3.F2A).v5_miR122_tp) |
| 152 | MEEQWAREIGAQLRRMADDLNAQYERRGSGVKQTLNFDLLKLAGDVESNP |
| | GPEEQWAREIGAQLRRMADDLNAQYERRGSGVKQTLNFDLKAGDVESNPGP |
| | EEQWAREIGAQLRRMADDNAQYERRGSGVKQTLNFDLLKLAGDVESNPGPE |
| | EQWAREIGAQLRRMADDLNAQYERRGSGVKQTLNFDLLKLAGDVESNPGPE |
| | EQWAREIGAQLRRMADDLNAQYERRGSGVKQTLNFDLLKLAGDVESNPGPG |
| | KPIPNPLLGLDST |
| | ((pumaBH3.F2A)\hat{ }5_cV5, (pumaBH3.F2A)\hat{ }5_cV5_DX) |
| 153 | MDMRPEIWIAQELRRIGDEFNAYYARRGSGVKQTLNFDLLKLAGDVESNPGP |
| | DMRPEIWIAQELRRIGDEFNAYYARRGSGVKQTLNFDLLKLAGDVESNPGPD |
| | MRPEIWIAQELRRIGDEFNAYYARRGSGVKQTLNFDLLKLAGDVESNPGPDM |
| | RPEIWIAQELRRIGDEFNAYYARRGSGVKQTLNFDLLKLAGDVESNPGPDMR |
| | PEIWIAQELRRIGDEFNAYYARRGSGVKQTLNFDLLKLAGDVESNPGPGKPIP |
| | NPLLGLDST |
| | ((BimBH3.F2A)\hat{ }5_cV5, (BimBH3.F2A)\hat{ }5_cV5_DX) |
| 154 | MQWAREIGAQLRRIGDDLNAQYERRRQGSGVKQTLNFDLLKLAGDVESNPG |
| | PQWAREIGAQLRRIGDDLNAQYERRRQGSGVKQTLNFDLLKLAGDVESNPG |
| | PQWAREIGAQLRRIGDDLNAQYERRRQGSGVKQTLNFDLLKLAGDVESNPG |
| | PGSGVKQTLNFDLLKLAGDVESNPGPGKPIPNPLLGLDST |
| | ((SuperPumaBH3.F2A)\hat{ }3_cV5) |
| 155 | MQWAREIGAQLRRIGDDLNAQYERRRQGSVKQTLNFDLLKLAGDVESNPGP |
| | QWAREIGAQRRIGDDLNAQYERRRQGSGVKQTLNFDLLKLAGDVESNPGPQ |
| | WAREIGAQLRRIGDDLNAQYERRRQGSGVKQTLNFDLLKLAGDVESNPGPQ |
| | AREIGAQLRRIGDDLNAQYERRRQGSGVKQTNFDLLKLAGDVESNPGPQWA |
| | REIGAQLRRIGDLNAQYERRRQGSGVKQTLNFDLLKLAGDVENPGPGKPIPNP |
| | LLGLDST ((SuperPumaBH3.F2A)\hat{ }5_cV5) |
| 156 | MQWAREIGAQERREADDENAQYERRRQGSGVKQTLNFDLLKLAGDVESNP |
| | GPQWAREIGAQERREADDENAQYERRRQGSGVKQTLNFDLLKLAGDVESN |
| | PGPQWAREIGAQERREADDENAQYERRRQGSGVKQTLNFDLLKLAGDVES |
| | NPGPQWAREIGAQERREADDENAQYERRRQGSGVKQTLNFDLLKLAGDVE |
| | SNPGPQWAREIGAQERREADDENAQYERRRQGSGVKQTLNFDLLKLAGDV |
| | ESNPGPGKPIPNPLLGLDST |
| | ((KittyCatBH3.F2A)\hat{ }5_cV5,(KittyCatBH3.F2A)\hat{ }5_cV5_DX) |
| 157 | MQWAREIGAQERREADDENAQYERRRQGSGVKQTLNFDLLKLAGDVESNP |
| | GPQWAREIGAQERREADDENAQYERRRQGSGVKQTLNFDLLKLAGDVESN |
| | PGPQWAREIGAQERREADDENAQYERRRQGSGVKQTLNFDLLKLAGDVES |
| | NPGPQWAREIGAQERREADDENAQYERRRQGSGVKQTLNFDLLKLAGDVE |
| | SNPGPQWAREIGAQERREADDENAQYERRRQGSGVKQTLNFDLLKLAGDV |
| | ESNPGPGKPIPNPLLGLDST |
| | ((KittyCatBH3.F2A)\hat{ }5_cV5, (KittyCatBH3.F2A)\hat{ }5_cV5_DX) |
| 158 | MNLWAAQRYGRELRRMSDEFVDSFKKGGSGVKQTLNFDLLKLAGDVESNP |
| | GPNLWAAQRYGRELRRMSDEFVDSFKKGGSGVKQTLNFDLLKLAGDVESNP |
| | GPNLWAAQRYGRELRRMSDEFVDSFKKGGSGVKQTLNFDLLKLAGDVESNP |
| | GPNLWAAQRYGRELRRMSDEFVDSFKKGGSGVKQTLNFDLLKLAGDVESNP |
| | GPNLWAAQRYGRELRRMSDEFVDSFKKGGSGVKQTLNFDLLKLAGDVESNP |
| | GPGKPIPNPLLGLDST |
| | ((BadBH3.F2A)\hat{ }5_cV5) |
| 159 | MPAELEVECATQLRRFGDKLNFRQKLLGSGVKQTLNFDLLKLAGDVESNPGP |
| | NLWAAQRYGRELRRMSDEFVDSFKKGGSGVKQTLNFDLLKLAGDVESNPGP |
| | PAELEVECATQLRRFGDKLNFRQKLLGSGVKQTLNFDLLKLAGDVESNPGPN |
| | LWAAQRYGRELRRMSDEFVDSFKKGGSGVKQTLNFDLLKLAGDVESNPGPP |
| | AELEVECATQLRRFGDKLNFRQKLLGSGVKQTLNFDLLKLAGDVESNPGPNL |
| | WAAQRYGRELRRMSDEFVDSFKKGGSGVKQTLNFDLLKLAGDVESNPGPGK |
| | PIPNPLLGLDST |
| | ((Noxa-F2A-BadBH3-F2A)\hat{ }3_cV5) |
| 160 | MEEQWAREIGAQLRRMADDLNAQYERRGSGVKQTLNFDLLKLAGDVESNP |
| | GPEEQWAREIGAQLRRMADDLNAQYERRGSGVKQTLNFDLLKLAGDVESNP |
| | GPEEQWAREIGAQLRRMADDLNAQYERRGSGVKQTLNFDLLKLAGDVESNP |
| | GPEEQWAREIGAQLRRMADDLNAQYERRGSGVKQTLNFDLLKLAGDVESNP |
| | GPEEQWAREIGAQLRRMADDLNAQYERRGSGVKQTLNFDLLKLAGDVESNP |
| | GPEEQWAREIGAQLRRMADDLNAQYERRGSGVKQTLNFDLLKLAGDVESNP |
| | GPEEQWAREIGAQLRRMADDLNAQYERRGSGVKQTLNFDLLKLAGDVESNP |
| | GPEEQWAREIGAQLRRMADDLNAQYERRGSGVKQTLNFDLLKLAGDVESNP |
| | GPEEQWAREIGAQLRRMADDLNAQYERRGSGVKQTLNFDLLKLAGDVESNP |
| | GPEEQWAREIGAQLRRMADDLNAQYERRGSGVKQTLNFDLLKLAGDVESNP |
| | GPGKPIPNPLLGLDST |
| | ((pumaBH3.F2A)\hat{ }10_cV5, (pumaBH3.F2A)\hat{ }10_cV5_DX) |
| 161 | MDMRPEIWIAQELRRIGDEFNAYYARRGSGVKQTLNFDLLKLAGDVESNPG |
| | PDMRPEIWIAQELRRIGDEFNAYYARRGSGVKQTLNFDLLKLAGDVESNPG |
| | PDMRPEIWIAQELRRIGDEFNAYYARRGSGVKQTLNFDLLKLAGDVESNPG |
| | PDMRPEIWIAQELRRIGDEFNAYYARRGSGVKQTLNFDLLKLAGDVESNPG |
| | PDMRPEIWIAQELRRIGDEFNAYYARRGSGVKQTLNFDLLKLAGDVESNPG |
| | PDMRPEIWIAQELRRIGDEFNAYYARRGSGVKQTLNFDLLKLAGDVESNPG |
| | PDMRPEIWIAQELRRIGDEFNAYYARRGSGVKQTLNFDLLKLAGDVESNPG |
| | PDMRPEIWIAQELRRIGDEFNAYYARRGSGVKQTLNFDLLKLAGDVESNPG |
| | PDMRPEIWIAQELRRIGDEFNAYYARRGSGVKQTLNFDLLKLAGDVESNPG |
| | PDMRPEIWIAQELRRIGDEFNAYYARRGSGVKQTLNFDLLKLAGDVESNPG |
| | PGKPIPNPLLGLDST |
| | ((BimBH3.F2A)\hat{ }10_cV5, (BimBH3.F2A)\hat{ }10_cV5_DX) |
| 162 | MEEQWAREIGAQLRRMADDLNAQYERRGSGVKQTLNFDLLKLAGDVESNP |
| | GPDMRPEIWIAQELRRIGDEFNAYYARRGSGVKQTLNFDLLKLAGDVESNPG |
| | PEEQWAREIGAQLRRMADDLNAQYERRGSGVKQTLNFDLLKLAGDVESNPG |
| | PDMRPEIWIAQELRRIGDEFNAYYARRGSGVKQTLNFDLLKLAGDVESNPGP |
| | EEQWAREIGAQLRRMADDLNAQYERRGSGVKQTLNFDLLKLAGDVESNPGP |
| | DMRPEIWIAQELRRIGDEFNAYYARRGSGVKQTLNFDLLKLAGDVESNPGPG |
| | KPIPNPLLGLDST |
| | ((Puma-P2A-BimBH3-F2A)\hat{ }3_cV5) |
| 163 | MEEQWAREIGA QLRRMADDLNAQYERRGSGVKQTLNFDLLKLAGDVESNP |
| | GPDMRPEIWIAQELRRIGDEFNAYYARRGSGVKQTLNFDLLKLAGDVESNPG |
| | PEEQWAREIGAQLRRMADDLNAQYERRGSGVKQTLNFDLLKLAGDVESNPG |
| | PDMRPEIWIAQELRRIGDEFNAYYARRGSGVKQTLNFDLLKLAGDVESNPGP |
| | EEQWAREIGAQLRRMADDLNAQYERRGSGVKQTLNFDLLKLAGDVESNPGP |
| | DMRPEIWIAQELRRIGDEFNAYYARRGSGVKQTLNFDLLKLAGDVESNPGPE |
| | EQWAREIGAQLRRMADDLNAQYERRGSGVKQTLNFDLLKLAGDVESNPGPD |
| | MRPEIWIAQELRRIGDEFNAYYARRGSGVKQTLNFDLLKLAGDVESNPGPEE |
| | QWAREIGAQLRRMADDLNAQYERRGSGVKQTLNFDLLKLAGDVESNPGPD |
| | MRPEIWIAQELRRIGDEFNAYYARRGSGVKQTLNFDLLKLAGDVESNPGPGK |
| | PIPNPLLGLDST |
| | ((Puma-F2A-BimBH3-F2A)\hat{ }5_cV5, (Puma-F2A-BimBH3F2A)\hat{ }5_cV5_DX) |
| 164 | MEEQWAREIGAQLRRMADDLNAQYERRGSGVKQTLNFDLLKLAGDVESN |
| | PGPDMRPEIWIAQELRRIGDEFNAYYARRGSGVKQTLNFDLLKLAGDVESN |
| | PGPEEQWAREIGAQLRRMADDLNAQYERRGSGVKQTLNFDLLKLAGDVES |
| | NPGPDMRPEIWIAQELRRIGDEFNAYYARRGSGVKQTLNFDLLKLAGDVEN |
| | PGPEEQWAREIGAQLRRMADDLNAQYERRGSGVKQTLNFDLLKLAGDVES |
| | NPGPDMRPEIWIAQERRIGDEFNAYYARRGSGVKQTLNFDLLKLAGDVESN |
| | PGPEEQWAREIGAQLRRMADDLNAQYERRGSGVKQTLNFDLLKLAGDVES |
| | NPGPDMRPEIWIAQELRRIGDEFNAYYARRGSGVKQTLNFDLLKLAGDVES |
| | NPGPEEQWAREIGAQLRRMADDLNAQYERRGSGVKQTLNFDLLKLAGDVE |
| | SNPGPDMRPEIWIAQELRRIGDEFNAYYARRGSGVKQTLNFDLLKLAGDVE |
| | SNPGPEEQWAREIGAQLRRMADDLNAQYERRGSGVKQTLNFDLLKLAGDV |
| | ESNPGPDMRPEIWIAQELRRIGDEFNAYYARRGSGVKQTLNFDLLKLAGDV |
| | ESNPGPEEQWAREIGAQLRRMADDLNAQYERRGSGVKQTLNFDLLKLAGD |
| | VESNPGPDMRPEIWIAQELRRIGDEFNAYYARRGSGVKQTLNFDLLKLAGD |
| | VESNPGPEEQWAREIGAQLRRMADDLNAQYERRGSGVKQTLNFDLLKLAG |
| | DVESNPGPDMRPEIWIAQELRRIGDEFNAYYARRGSGVKQTLNFDLLKLAG |
| | DVESNPGPEEQWAREIGAQLRRMADDLNAQYERRGSGVKQTLNFDLLKLA |
| | GDVESNPGPDMRPEIWIAQELRRIGDEFNAYYARRGSGVKQTLNFDLLKLA |
| | GDVESNPGPEEQWAREIGAQLRRMADDLNAQYERRGSGVKQTLNFDLLKL |
| | AGDVESNPGPDMRPEIWIAQELRRIGDEFNAYYARRGSGVKQTLNFDLLKL |
| | AGDVESNPGPGKPIPNPLLGLDST |
| | ((Puma-F2A-BimBH3-F2A)\hat{ }10_cV5) |
| 165 | MQWAREIGAQLRRIGDDLNAQYERRRQGSGVKQTLNFDLLKLAGDVESNP |
| | GPQWAREIGAQLRRIGDDLNAQYERRRQGSGVKQTLNFDLLKLAGDVESN |
| | PGPQWAREIGAQLRRIGDDLNAQYERRRQGSGVKQTLNFDLLKLAGDVES |
| | NPGPQWAREIGAQLRRIGDDLNAQYERRRQGSGVKQTLNFDLLKLAGDES |
| | NPGPQWAREIGAQLRRIGDDLNAQYERRRQGSGVKQTLNFDLLKLAGDVE |
| | SNPGPQWAREIGAQLRRIGDDLNAQYERRRQGSGVKQTLNFDLLKLAGDV |
| | ESNPGPQWAREIGAQLRRIGDDLNAQYERRRQGSGVKQTLNFDLLKLAGD |
| | VESNPGPQWAREIGAQLRRIGDDLNAQYERRRQGSGVKQTLNFDLLKLAG |
| | DVESNPGPQWAREIGAQLRRIGDDLNAQYERRRQGSGVKQTLNFDLLKLA |
| | GDVESNPGPQWAREIGAQLRRIGDDLNAQYERRRQGSGVKQTLNFDLLKL |
| | AGDVESNPGPGKPIPNPLLGLDST |
| | ((SuperPumaBH3.F2A)\hat{ }10_cV5, (SuperPumaBH3.F2A)\hat{ }10_cV5_DX) |
| 166 | MQWAREIGAQERREADDENAQYERRRQGSGVKQTLNFDLLKLAGDVESNP |
| | GPQWAREIGAQERREADDENAQYERRRQGSGVKQTLNFDLLKLAGDVESN |
| | PGPQWAREIGAQERREADDENAQYERRRQGSGVKQTLNFDLLKLAGDVES |
| | NPGPQWAREIGAQERREADDENAQYERRRQGSGVKQTLNFDLLKLAGDVE |
| | SNPGPQWAREIGAQERREADDENAQYERRRQGSGVKQTLNFDLLKLAGDV |
| | ESNPGPQWAREIGAQERREADDENAQYERRRQGSGVKQTLNFDLLKLAGD |
| | VESNPGPQWAREIGAQERREADDENAQYERRRQGSGVKQTLNFDLLKLAG |
| | DVESNPGPQWAREIGAQERREADDENAQYERRRQGSGVKQTLNFDLLKLA |
| | GDVESNPGPQWAREIGAQERREADDENAQYERRRQGSGVKQTLNFDLLKL |
| | AGDVESNPGPQWAREIGAQERREADDENAQYERRRQGSGVKQTLNFDLLK |
| | LAGDVESNPGPQWAREIGAQERREADDENAQYERRRQGSGVKQTLNFDLL |
| | KLAGDVESNPGPGKPIPNPLLGLDST |
| | ((KittyCatBH3.F2A)\hat{ }10_cV5, (KittyCatBH3.F2A)\hat{ }10_cV5_DX) |
| 167 | MQWAREIGAQERREADDENAQYERRRQGSGVKQTLNFDLLKLAGDVESNP |
| | GPQWAREIGAQERREADDENAQYERRRQGSGVKQTLNFDLLKLAGDVESN |
| | PGPQWAREIGAQERREADDENAQYERRRQGSGVKQTLNFDLLKLAGDVES |
| | NPGPQWAREIGAQERREADDENAQYERRRQGSGVKQTLNFDLLKLAGDVE |
| | SNPGPQWAREIGAQERREADDENAQYERRRQGSGVKQTLNFDLLKLAGDV |
| | ESNPGPQWAREIGAQERREADDENAQYERRRQGSGVKQTLNFDLLKLAGD |
| | VESNPGPQWAREIGAQERREADDNAQYERRRQGSGVKQTLNFDLLKLAGD |
| | VESNPGPQWAREIGAQERREADDENAQYERRRQGSGVKQTLNFDLLKLAG |
| | DVESNPGPQWAREIGAQERREADDENAQYERRRQGSGVKQTLNFDLLKLA |
| | GDVESNPGPQWAREIGAQERREADDENAQYERRRQGSGVKQTLNFDLLKL |
| | AGDVESNPGPQWAREIGAQERREADDENAQYERRRQGSGVKQTLNFDLLK |
| | LAGDVESNPGPGKPIPNPLLGLDST |
| | ((KittyCatBH3.F2A)\hat{ }10_cV5, (KittyCatBH3.F2A)\hat{ }10_cV5_DX) |
| 168 | MPAELEVECATQLRRFGDKLNFRQKLLGSGVKQTLNFDLLKLAGDVESNPGP |
| | PAELEVECATQLRRFGDKLNFRQKLLGSGVKQTLNFDLLKLAGDVESNPGPP |
| | AELEVECATQLRRFGDKLNFRQKLLGSGVKQTLNFDLLKLAGDVESNPGPPA |
| | ELEVECATQLRRFGDKLNFRQKLLGSGVKQTLNFDLLKLAGDVESNPGPPAE |
| | LEVECATQLRRFGDKLNFRQKLLGSGVKQTLNFDLLKLAGDVESNPGPPAEL |
| | EVECATQLRRFGDKLNFRQKLLGSGVKQTLNFDLLKLAGDVESNPGPGKPIP |
| | NPLLGLDST |
| | ((NoxaBH3.F2A)\hat{ }5_cV5, (NoxaBH3.F2A)\hat{ }5_cV5_DX) |
| 169 | MPAELEVECATQLRRFGDKLNFRQKLLGSGVKQTLNFDLLKLAGDVESNPGP |
| | PAELEVECATQLRRFGDKLNFRQKLLGSGVKQTLNFDLLKLAGDVESNPGPP |
| | AELEVECATQLRRFGDKLNFRQKLLGSGVKQTLNFDLLKLAGDVESNPGPPA |
| | ELEVECATQLRRFGDKLNFRQKLLGSGVKQTLNFDLLKLAGDVESNPGPPAE |
| | LEVECATQLRRFGDKLNFRQKLLGSGVKQTLNFDLLKLAGDVESNPGPPAEL |
| | EVECATQLRRFGDKLNFRQKLLGSGVKQTLNFDLLKLAGDVESNPGPPAELE |
| | VECATQLRRFGDKLNFRQKLLGSGVKQTLNFDLLKLAGDVESNPGPPAELEV |
| | ECATQLRRFGDKLNFRQKLLGSGVKQTLNFDLLKLAGDVESNPGPPAELEVE |
| | CATQLRRFGDKLNFRQKLLGSGVKQTLNFDLLKLAGDVESNPGPPAELEVEC |
| | ATQLRRFGDKLNFRQKLLGSGVKQTLNFDLLKLAGDVESNPGPPAELEVECA |
| | TQLRRFGDKLNFRQKLLGSGVKQTLNFDLLKLAGDVESNPGPGKPIPNPLLGL |
| | DST |
| | ((NoxaBH3.F2A)\hat{ }10_cV5, (NoxaBH3.F2A)\hat{ }10_cV5_DX) |
| 170 | MNLWAAQRYGRELRRMSDEFVDSFKKGGSGVKQTLNFDLLKLAGDVESNP |
| | GPNLWAAQRYGRELRRMSDEFVDSFKKGGSGVKQTLNFDLLKLAGDVESNP |
| | GPNLWAAQRYGRELRRMSDEFVDSFKKGGSGVKQTLNFDLLKLAGDVESNP |
| | GPNLWAAQRYGRELRRMSDEFVDSFKKGGSGVKQTLNFDLLKLAGDVESNP |
| | GPNLWAAQRYGRELRRMSDEFVDSFKKGGSGVKQTLNFDLLKLAGDVESNP |
| | GPNLWAAQRYGRELRRMSDEFVDSFKKGGSGVKQTLNFDLLKLAGDVESNP |
| | GPNLWAAQRYGRELRRMSDEFVDSFKKGGSGVKQTLNFDLLKLAGDVESNP |
| | GPNLWAAQRYGRELRRMSDEFVDSFKKGGSGVKQTLNFDLLKLAGDVESNP |
| | GPNLWAAQRYGRELRRMSDEFVDSFKKGGSGVKQTLNFDLLKLAGDVESNP |
| | GPNLWAAQRYGRELRRMSDEFVDSFKKGGSGVKQTLNFDLLKLAGDVESNP |
| | GPGKPIPNPLLGLDST |
| | ((BadBH3.F2A)\hat{ }10_cV5,(BadBH3.F2A)\hat{ }10_cV5_DX) |
| 171 | MPAELEVECATQLRRFGDKLNFRQKLLGSGVKQTLNFDLLKLAGDVESNPGP |
| | NLWAAQRYGRELRRMSDEFVDSFKKGGSGVKQTLNFDLLKLAGDVESNPGP |
| | PAELEVECATQLRRFGDKLNFRQKLLGSGVKQTLNFDLLKLAGDVESNPGPN |
| | LWAAQRYGRELRRMSDEFVDSFKKGGSGVKQTLNFDLLKLAGDVESNPGPP |
| | AELEVECATQLRRFGDKLNFRQKLLGSGVKQTLNFDLLKLAGDVESNPGPNL |
| | WAAQRYGRELRRMSDEFVDSFKKGGSGVKQTLNFDLLKLAGDVESNPGPPA |
| | ELEVECATQLRRFGDKLNFRQKLLGSGVKQTLNFDLLKLAGDVESNPGPNL |
| | WAAQRYGRELRRMSDEFVDSFKKGGSGVKQTLNFDLLKLAGDVESNPGPPA |
| | ELEVECATQLRRFGDKLNFRQKLLGSGVKQTLNFDLLKLAGDVESNPGPNL |
| | WAAQRYGRELRRMSDEFVDSFKKGGSGVKQTLNFDLLKLAGDVESNPGPGK |
| | PIPNPLLGLDST |
| | ((Noxa-F2A-BadBH3-F2A)\hat{ }5_cV5, (Noxa-F2A-BadBH3-F2A)\hat{ }5_cV5_DX) |
| 172 | MPAELEVECATQLRRFGDKLNFRQKLLGSGVKQTLNFDLLKLAGDVESNPG |
| | PNLWAAQRYGRELRRMSDEFVDSFKKGGSGVKQTLNFDLLKLAGDVESNP |
| | GPPAELEVECATQLRRFGDKLNFRQKLLGSGVKQTLNFDLLKLAGDVESNP |
| | GPNLWAAQRYGRELRRMSDEFVDSFKKGGSGVKQTLNFDLLKLAGDVESN |
| | GPPAELEVECATQLRRFGDKLNFRQKLLGSGVKQTLNFDLLKLAGDVESNP |
| | GPNLWAAQRYGRELRRMSDEFVDSFKKGGSGVKQTLNFDLLKLAGDVESN |
| | PGPPAELEVECATQLRRFGDKLNFRQKLLGSGVKQTLNFDLLKLAGDVESN |
| | PGPNLWAAQRYGRELRRMSDEFVDSFKKGGSGVKQTLNFDLLKLAGDVES |
| | NPGPPAELEVECATQLRRFGDKLNFRQKLLGSGVKQTLNFDLLKLAGDVES |
| | NPGPNLWAAQRYGRELRRMSDEFVDSFKKGGSGVKQTLNFDLLKLAGDVE |
| | SNPGPPAELEVECATQLRRFGDKLNFRQKLLGSGVKQTLNFDLLKLAGDVE |
| | SNPGPNLWAAQRYGRELRRMSDEFVDSFKKGGSGVKQTLNFDLLKLAGDV |
| | ESNPGPPAELEVECATQLRRFGDKLNFRQKLLGSGVKQTLNFDLLKLAGDV |
| | ESNPGPNLWAAQRYGRELRRMSDEFVDSFKKGGSGVKQTLNFDLLKLAGD |
| | VESNPGPPAELEVECATQLRRFGDKLNFRQKLLGSGVKQTLNFDLLKLAGD |
| | VESNPGPNLWAAQRYGRELRRMSDEFVDSFKKGGSGVKQTLNFDLLKLAG |
| | DVESNPGPPAELEVECATQLRRFGDKLNFRQKLLGSGVKQTLNFDLLKLAG |
| | DVESNPGPNLWAAQRYGRELRRMSDEFVDSFKKGGSGVKQTLNFDLLKLA |
| | GDVESNPGPPAELEVECATQLRRFGDKLNFRQKLLGSGVKQTLNFDLLKLA |
| | GDVESNPGPNLWAAQRYGRELRRMSDEFVDSFKKGGSGVKQTLNFDLLKL |
| | AGDVESNPGPGKPIPNPLLGLDST |
| | ((Noxa-F2A-BadBH3-F2A)\hat{ }10_cV5) |
| 173 | MEEQWAREIGAQLRRMADDLNAQYERRGSGVKQTLNFDLLKLAGDVESNP |
| | GPDMRPEIWIAQELRRIGDEFNAYYARRGSGVKQTLNFDLLKLAGDVESNPG |
| | PEEQWAREIGAQLRRMADDLNAQYERRGSGVKQTLNFDLLKLAGDVESNPG |
| | PDMRPEIWIAQELRRIGDEFNAYYARRGSGVKQTLNFDLLKLAGDVESNPGP |
| | EEQWAREIGAQLRRMADDLNAQYERRGSGVKQTLNFDLLKLAGDVESNPGP |
| | DMRPEIWIAQELRRIGDEFNAYYARRGSGVKQTLNFDLLKLAGDVESNPGPG |
| | KPIPNPLLGLDST |
| | ((Puma-F2A-BimBH3-F2A)\hat{ }3_cV5_DX) |
| 174 | MQWAREIGAQLRRIGDDLNAQYERRRQGSGVKQTLNFDLLKLAGDVESNPG |
| | PQWAREIGAQLRRIGDDLNAQYERRRQGSGVKQTLNFDLLKLAGDVESNPG |
| | PQWAREIGAQLRRIGDDLNAQYERRRQGSGVKQTLNFDLLKLAGDVESNPG |
| | PGSGVKQTLNFDLLKLAGDVESNPGPGKPIPNPLLGLDST |
| | ((SuperPumaBH3.F2A)\hat{ }3_cV5_DNA2.0) |
| 175 | MEEQWAREIGAQLRRMADDLNAQYERRGSGVKQTLNFDLLKLAGDVESNP |
| | GPDMRPEIWIAQELRRIGDEFNAYYARRGSGVKQTLNFDLLKLAGDVESNPG |
| | PEEQWAREIGAQLRRMADDLNAQYERRGSGVKQTLNFDLLKLAGDVESNPG |
| | PDMRPEIWIAQELRRIGDEFNAYYARRGSGVKQTLNFDLLKLAGDVESNPGP |
| | EEQWAREIGAQLRRMADDLNAQYERRGSGVKQTLNFDLLKLAGDVESNPGP |
| | DMRPEIWIAQELRRIGDEFNAYYARRGSGVKQTLNFDLLKLAGDVESNPGPG |
| | KPIPNPLLGLDST |
| | ((Puma-F2A-BimBH3-F2A)\hat{ }3_cV5_DX_DNA2.0) |
| 176 | MQWAREIGAQLRRIGDDLNAQYERRRQGSGVKQTLNFDLLKLAGDVESNPG |
| | PQWAREIGAQLRRIGDDLNAQYERRRQGSGVKQTLNFDLLKLAGDVESNPG |
| | PQWAREIGAQLRRIGDDLNAQYERRRQGSGVKQTLNFDLLKLAGDVESNPG |
| | PQWAREIGAQLRRIGDDLNAQYERRRQGSGVKQTLNFDLLKLAGDVESNPG |
| | PQWAREIGAQLRRIGDDLNAQYERRRQGSGVKQTLNFDLLKLAGDVESNPG |
| | PGKPIPNPLLGLDST |
| | ((SuperPumaBH3.F2A)\hat{ }5_cV5_DNA2.0) |
| 177 | MEEQWAREIGAQLRRMADDLNAQYERRGSGVKQTLNFDLLKLAGDVESNP |
| | GPEEQWAREIGAQLRRMADDLNAQYERRGSGVKQTLNFDLLKLAGDVESNP |
| | GPEEQWAREIGAQLRRMADDLNAQYERRGSGVKQTLNFDLLKLAGDVESNP |
| | GPEEQWAREIGAQLRRMADDLNAQYERRGSGVKQTLNFDLLKLAGDVESNP |
| | GPEEQWAREIGAQLRRMADDLNAQYERRGSGVKQTLNFDLLKLAGDVESNP |
| | GPGKPIPNPLLGLDST |
| | ((pumaBH3.F2A)\hat{ }5_cV5_DNA2.0) |
| 178 | MQWAREIGAQERREADDENAQYERRRQGSGVKQTLNFDLLKLAGDVESNP |
| | GPQWAREIGAQERREADDENAQYERRRQGSGVKQTLNFDLLKLAGDVESN |
| | PGPQWAREIGAQERREADDENAQYERRRQGSGVKQTLNFDLLKLAGDVES |
| | NPGPQWAREIGAQERREADDENAQYERRRQGSGVKQTLNFDLLKLAGDVE |
| | SNPGPQWAREIGAQERREADDENAQYERRRQGSGVKQTLNFDLLKLAGDV |
| | ESNPGPGKPIPNPLLGLDST |
| | ((KittyCatBH3.F2A)\hat{ }5_cV5_DNA2.0) |
| 179 | MQWAREIGAQERREADDENAQYERRRQGSGVKQTLNFDLLKLAGDVESNP |
| | GPQWAREIGAQERREADDENAQYERRRQGSGVKQTLNFDLLKLAGDVESN |
| | PGPQWAREIGAQERREADDENAQYERRRQGSGVKQTLNFDLLKLAGDVES |
| | NPGPQWAREIGAQERREADDENAQYERRRQGSGVKQTLNFDLLKLAGDVE |
| | SNPGPQWAREIGAQERREADDENAQYERRRQGSGVKQTLNFDLLKLAGDV |
| | ESNPGPQWAREIGAQERREADDENAQYERRRQGSGVKQTLNFDLLKLAGD |
| | VESNPGPQWAREIGAQERREADDENAQYERRRQGSGVKQTLNFDLLKLAG |
| | DVESNPGPQWAREIGAQERREADDENAQYERRRQGSGVKQTLNFDLLKLA |
| | GDVESNPGPQWAREIGAQERREADDENAQYERRRQGSGVKQTLNFDLLKL |
| | AGDVESNPGPQWAREIGAQERREADDENAQYERRRQGSGVKQTLNFDLLK |
| | LAGDVESNPGPQWAREIGAQERREADDENAQYERRRQGSGVKQTLNFDLL |
| | KLAGDVESNPGPGKPIPNPLLGLDST |
| | (KittyCatBH3.F2A)\hat{ }10_cV5_DNA2.0) |
| 180 | MEEQWAREIGAQLRRMADDLNAQYERRGSGVKQTLNFDLLKLAGDVESNP |
| | GPEEQWAREIGAQLRRMADDLNAQYERRGSGVKQTLNFDLLKLAGDVESNP |
| | GPEEQWAREIGAQLRRMADDLNAQYERRGSGVKQTLNFDLLKLAGDVESNP |
| | GPEEQWAREIGAQLRRMADDLNAQYERRGSGVKQTLNFDLLKLAGDVESNP |
| | GPEEQWAREIGAQLRRMADDLNAQYERRGSGVKQTLNFDLLKLAGDVESNP |
| | GPEEQWAREIGAQLRRMADDLNAQYERRGSGVKQTLNFDLLKLAGDVESNP |
| | GPEEQWAREIGAQLRRMADDLNAQYERRGSGVKQTLNFDLLKLAGDVESNP |
| | GPEEQWAREIGAQLRRMADDLNAQYERRGSGVKQTLNFDLLKLAGDVESNP |
| | GPEEQWAREIGAQLRRMADDLNAQYERRGSGVKQTLNFDLLKLAGDVESNP |
| | GPEEQWAREIGAQLRRMADDLNAQYERRGSGVKQTLNFDLLKLAGDVESNP |
| | GPGKPIPNPLLGLDST |
| | ((pumaBH3.F2A)\hat{ }10_cV5_DNA2.0) |
| 181 | MEEQWAREIGAQLRRMADDLNAQYERRGSGVKQTLNFDLLKLAGDVESNP |
| | GPDMRPEIWIAQELRRIGDEFNAYYARRGSGVKQTLNFDLLKLAGDVESNPG |
| | PEEQWAREIGAQLRRMADDLNAQYERRGSGVKQTLNFDLLKLAGDVESNPG |
| | PDMRPEIWIAQELRRIGDEFNAYYARRGSGVKQTLNFDLLKLAGDVESNPGP |
| | EEQWAREIGAQLRRMADDLNAQYERRGSGVKQTLNFDLLKLAGDVESNPGP |
| | DMRPEIWIAQELRRIGDEFNAYYARRGSGVKQTLNFDLLKLAGDVESNPGPE |
| | EQWAREIGAQLRRMADDLNAQYERRGSGVKQTLNFDLLKLAGDVESNPGPD |
| | MRPEIWIAQELRRIGDEFNAYYARRGSGVKQTLNFDLLKLAGDVESNPGPEE |
| | QWAREIGAQLRRMADDLNAQYERRGSGVKQTLNFDLLKLAGDVESNPGPD |
| | MRPEIWIAQELRRIGDEFNAYYARRGSGVKQTLNFDLLKLAGDVESNPGPGK |
| | PIPNPLLGLDST |
| | ((Puma-F2A-BimBH3-F2A)\hat{ }5_cV5_DNA2.0) |
| 182 | MQWAREIGAQLRRIGDDLNAQYERRRQGSGVKQTLNFDLLKLAGDVESNP |
| | GPQWAREIGAQLRRIGDDLNAQYERRRQGSGVKQTLNFDLLKLAGDVESN |
| | PGPQWAREIGAQLRRIGDDLNAQYERRRQGSGVKQTLNFDLLKLAGDVES |
| | NPGPQWAREIGAQLRRIGDDLNAQYERRRQGSGVKQTLNFDLLKLAGDVE |
| | SNPGPQWAREIGAQLRRIGDDLNAQYERRRQGSGVKQTLNFDLLKLAGDV |
| | ESNPGPQWAREIGAQLRRIGDDLNAQYERRRQGSGVKQTLNFDLLKLAGD |
| | VESNPGPQWAREIGAQLRRIGDDLNAQYERRRQGSGVKQTLNFDLLKLAG |
| | DVESNPGPQWAREIGAQLRRIGDDLNAQYERRRQGSGVKQTLNFDLLKLA |
| | GDVESNPGPQWAREIGAQLRRIGDDLNAQYERRRQGSGVKQTLNFDLLKL |
| | AGDVESNPGPQWAREIGAQLRRIGDDLNAQYERRRQGSGVKQTLNFDLLK |
| | LAGDVESNPGPGKPIPNPLLGLDST |
| | ((SuperPumaBH3.F2A)\hat{ }10_cV5_DNA2.0) |
| 183 | MQWAREIGAQERREADDENAQYERRRQGSGVKQTLNFDLLKLAGDVESNP |
| | GPQWAREIGAQERREADDENAQYERRRQGSGVKQTLNFDLLKLAGDVESNP |
| | GPQWAREIGAQERREADDENAQYERRRQGSGVKQTLNFDLLKLAGDVESNP |
| | GPGKPIPNPLLGLDST |
| | ((KittyCatBH3.F2A)\hat{ }3_cV5) |
| 184 | MQWAREIGAQERREADDENAQYERRRQGSGATNFSLLKQAGDVEENPGPQ |
| | WAREIGAQERREADDENAQYERRRQGSGATNFSLLKQAGDVEENPGPQWA |
| | REIGAQERREADDENAQYERRRQGSGVKQTLNFDLLKLAGDVESNPGPGKPI |
| | PNPLLGLDST |
| | ((KittyCatBH3.P2A)\hat{ }3_cV5) |
| 185 | MEEQWAREIGAQLRRMADDLNAQYERRGSGATNFSLLKQAGDVEENPGPEE |
| | QWAREIGAQLRRMADDLNAQYERRGSGATNFSLLKQAGDVEENPGPEEQW |
| | AREIGAQLRRMADDLNAQYERRGKPIPNPLLGLDST |
| | (PumaBH3(x3.P2A).v5_miR122) |
| 186 | MEEQWAREIGAQLRRMADDLNAQYERRGGGSGGGSGGGSEEQWAREIGAQ |
| | LRRMADDLNAQYERRGGGSGGGSGGGSEEQWAREIGAQLRRMADDLNAQY |
| | ERRGKPIPNPLLGLDST |
| | ((PUMA BH3.GGGSx3)x3.V5) |
| 187 | MEEQWAREIGAQLRRMADDLNAQYERRGGGSGGGSGGGSEEQWAREIGAQ |
| | LRRMADDLNAQYERRGGGSGGGSGGGSEEQWAREIGAQLRRMADDLNAQY |
| | ERRGKPIPNPLLGLDST |
| | ((PUMA BH3.GGGSx3)x3.V5_DX) |
| 188 | MEEQWAREIGAQLRRMADDLNAQYERRGGGSGGGSGGGSEEQWAREIGAQ |
| | LRRMADDLNAQYERRGKPIPNPLLGLDST |
| | (PUMA BH3.GGGSx3.PUMA BH3.V5) |
| 189 | MEEQWAREIGAQLRRMADDLNAQYERRGSGATNFSLLKQAGDVEENPGPEE |
| | QWAREIGAQLRRMADDLNAQYERRGSGATNFSLLKQAGDVEENPGPEEQW |
| | AREIGAQLRRMADDLNAQYERRGKPIPNPLLGLDST |
| | (PumaBH3(x3.P2A).v5_miR122) |
| 190 | MEEQWAREIGAQLRRMADDLNAQYERR |
| | (PumaBH3_HS3UPCRfree) |
| 191 | MEEQWAREIGAQLRRMADDLNAQYERR |
| | (PumaBH3_HS3UPCRfree without His Tag) |
| 192 | MEEQWAREIGAQLRRMADDLNAQYERR |
| | (PumaBH3_HS3UPCRfree without v5 tag) |
| 193 | MEEQWAREIGAQLRRMADDLNAQYERR |
| | (PumaBH3_HS3UPCRfree without His tag) |
| 194 | MEEQWAREIGAQLRRMADDLNAQYERRGSGVKQTLNFDLLKLAGDVESNP |
| | GPEEQWAREIGAQLRRMADDLNAQYERRGSGVKQTLNFDLLKLAGDVESNP |
| | GPEEQWAREIGAQLRRMADDLNAQYERR |
| | (PumaBH3(x3.F2A)_Hs3UPCRfree without v5 tag) |
| 195 | MEEQWAREIGAQLRRMADDLNAQYERR |
| | (PumaBH3_HS3UPCRfree without the v5 tag) |
| 196 | MEEQWAREIGAQLRRMADDLNAQYERRGSGVKQTLNFDLLKLAGDVESNP |
| | GPEEQWAREIGAQLRRMADDLNAQYERRGSGVKQTLNFDLLKLAGDVESNP |
| | GPEEQWAREIGAQLRRMADDLNAQYERR |
| | (PumaBH3(x3.F2A)_miR142.3p_tp without the v5 tag) |
| 197 | MEEQWAREIGAQLRRMADDLNAQYERRGSGVKQTLNFDLLKLAGDVESNP |
| | GPEEQWAREIGAQLRRMADDLNAQYERRGSGVKQTLNFDLLKLAGDVESNP |
| | GPEEQWAREIGAQLRRMADDLNAQYERR |
| | (PumaBH3(x3.F2A)_miR122/142.3p_tp without the v5 tag) |
| 198 | MEEQWAREIGAQLRRMADDLNAQYERRGSGVKQTLNFDLLKLAGDVESNP |
| | GPEEQWAREIGAQLRRMADDLNAQYERRGSGVKQTLNFDLLKLAGDVESNP |
| | GPEEQWAREIGAQLRRMADDLNAQYERR |
| | (PumaBH3(x3.F2A) tp without the v5 tag) |
| 199 | MEEQWAREIGAQLRRMADDLNAQYERRGSGVKQTLNFDLLKLAGDVESNP |
| | GPEEQWAREIGAQLRRMADDLNAQYERRGSGVKQTLNFDLLKLAGDVESNP |
| | GPEEQWAREIGAQLRRMADDLNAQYERR |
| | (PumaBH3(x3.F2A)_miR122_tp without the v5 tag) |
| 200 | MEEQWAREIGAQLRRMADDLNAQYERRGSGVKQTLNFDLLKLAGDVESNP |
| | GPEEQWAREIGAQLRRMADDLNAQYERRGSGVKQTLNFDLKAGDVESNPGP |
| | EEQWAREIGAQLRRMADDNAQYERRGSGVKQTLNFDLLKLAGDVESNPGPE |
| | EQWAREIGAQLRRMADDLNAQYERRGSGVKQTLNFDLLKLAGDVESNPGPE |
| | EQWAREIGAQLRRMADDLNAQYERRGSGVKQTLNFDLLKLAGDVESNPGP |
| | ((pumaBH3.F2A)\hat{ }5, (pumaBH3.F2A)\hat{ }5_DX without the v5 tag) |
| 201 | MDMRPEIWIAQELRRIGDEFNAYYARRGSGVKQTLNFDLLKLAGDVESNPGP |
| | DMRPEIWIAQELRRIGDEFNAYYARRGSGVKQTLNFDLLKLAGDVESNPGPD |
| | MRPEIWIAQELRRIGDEFNAYYARRGSGVKQTLNFDLLKLAGDVESNPGPDM |
| | RPEIWIAQELRRIGDEFNAYYARRGSGVKQTLNFDLLKLAGDVESNPGPDMR |
| | PEIWIAQELRRIGDEFNAYYARRGSGVKQTLNFDLLKLAGDVESNPGP |
| | ((BimBH3.F2A)\hat{ }5, (BimBH3.F2A)\hat{ }5_DX without the v5 tag) |
| 202 | MQWAREIGAQLRRIGDDLNAQYERRRQGSGVKQTLNFDLLKLAGDVESNPG |
| | PQWAREIGAQLRRIGDDLNAQYERRRQGSGVKQTLNFDLLKLAGDVESNPG |
| | PQWAREIGAQLRRIGDDLNAQYERRRQGSGVKQTLNFDLLKLAGDVESNPG |
| | PGSGVKQTLNFDLLKLAGDVESNPGP |
| | ((SuperPumaBH3.F2A)\hat{ }3 without the v5 tag) |
| 203 | MQWAREIGAQLRRIGDDLNAQYERRRQGSVKQTLNFDLLKLAGDVESNPGP |
| | QWAREIGAQRRIGDDLNAQYERRRQGSGVKQTLNFDLLKLAGDVESNPGPQ |
| | WAREIGAQLRRIGDDLNAQYERRRQGSGVKQTLNFDLLKLAGDVESNPGPQ |
| | AREIGAQLRRIGDDLNAQYERRRQGSGVKQTNFDLLKLAGDVESNPGPQWA |
| | REIGAQLRRIGDLNAQYERRRQGSGVKQTLNFDLLKLAGDVENPGP |
| | ((SuperPumaBH3.F2A)\hat{ }5 without the v5 tag) |
| 204 | MQWAREIGAQERREADDENAQYERRRQGSGVKQTLNFDLLKLAGDVESNP |
| | GPQWAREIGAQERREADDENAQYERRRQGSGVKQTLNFDLLKLAGDVESN |
| | PGPQWAREIGAQERREADDENAQYERRRQGSGVKQTLNFDLLKLAGDVES |
| | NPGPQWAREIGAQERREADDENAQYERRRQGSGVKQTLNFDLLKLAGDVE |
| | SNPGPQWAREIGAQERREADDENAQYERRRQGSGVKQTLNFDLLKLAGDV |
| | ESNPGP |
| | ((KittyCatBH3.F2A)\hat{ }5,(KittyCatBH3.F2A)\hat{ }5_DX without the v5 tag) |
| 205 | MQWAREIGAQERREADDENAQYERRRQGSGVKQTLNFDLLKLAGDVESNP |
| | GPQWAREIGAQERREADDENAQYERRRQGSGVKQTLNFDLLKLAGDVESN |
| | PGPQWAREIGAQERREADDENAQYERRRQGSGVKQTLNFDLLKLAGDVES |
| | NPGPQWAREIGAQERREADDENAQYERRRQGSGVKQTLNFDLLKLAGDVE |
| | SNPGPQWAREIGAQERREADDENAQYERRRQGSGVKQTLNFDLLKLAGDV |
| | ESNPGPGKPIPNPLLGLDST |
| | ((KittyCatBH3.F2A)\hat{ }5, (KittyCatBH3.F2A)\hat{ }5_DX without the v5 tag) |
| 206 | MNLWAAQRYGRELRRMSDEFVDSFKKGGSGVKQTLNFDLLKLAGDVESNP |
| | GPNLWAAQRYGRELRRMSDEFVDSFKKGGSGVKQTLNFDLLKLAGDVESNP |
| | GPNLWAAQRYGRELRRMSDEFVDSFKKGGSGVKQTLNFDLLKLAGDVESNP |
| | GPNLWAAQRYGRELRRMSDEFVDSFKKGGSGVKQTLNFDLLKLAGDVESNP |
| | GPNLWAAQRYGRELRRMSDEFVDSFKKGGSGVKQTLNFDLLKLAGDVESNP |
| | GP |
| | ((BadBH3.F2A)\hat{ }5 without the v5 tag) |
| 207 | MPAELEVECATQLRRFGDKLNFRQKLLGSGVKQTLNFDLLKLAGDVESNPGP |
| | NLWAAQRYGRELRRMSDEFVDSFKKGGSGVKQTLNFDLLKLAGDVESNPGP |
| | PAELEVECATQLRRFGDKLNFRQKLLGSGVKQTLNFDLLKLAGDVESNPGPN |
| | LWAAQRYGRELRRMSDEFVDSFKKGGSGVKQTLNFDLLKLAGDVESNPGPP |
| | AELEVECATQLRRFGDKLNFRQKLLGSGVKQTLNFDLLKLAGDVESNPGPNL |
| | WAAQRYGRELRRMSDEFVDSFKKGGSGVKQTLNFDLLKLAGDVESNPGP |
| | ((Noxa-F2A-BadBH3-F2A)\hat{ }3 without the v5 tag) |
| 208 | MEEQWAREIGAQLRRMADDLNAQYERRGSGVKQTLNFDLLKLAGDVESNP |
| | GPEEQWAREIGAQLRRMADDLNAQYERRGSGVKQTLNFDLLKLAGDVESNP |
| | GPEEQWAREIGAQLRRMADDLNAQYERRGSGVKQTLNFDLLKLAGDVESNP |
| | GPEEQWAREIGAQLRRMADDLNAQYERRGSGVKQTLNFDLLKLAGDVESNP |
| | GPEEQWAREIGAQLRRMADDLNAQYERRGSGVKQTLNFDLLKLAGDVESNP |
| | GPEEQWAREIGAQLRRMADDLNAQYERRGSGVKQTLNFDLLKLAGDVESNP |
| | GPEEQWAREIGAQLRRMADDLNAQYERRGSGVKQTLNFDLLKLAGDVESNP |
| | GPEEQWAREIGAQLRRMADDLNAQYERRGSGVKQTLNFDLLKLAGDVESNP |
| | GPEEQWAREIGAQLRRMADDLNAQYERRGSGVKQTLNFDLLKLAGDVESNP |
| | GPEEQWAREIGAQLRRMADDLNAQYERRGSGVKQTLNFDLLKLAGDVESNP |
| | GP |
| | ((pumaBH3.F2A)\hat{ }10, (pumaBH3.F2A)\hat{ }10_DX without the v5 tag) |
| 209 | MDMRPEIWIAQELRRIGDEFNAYYARRGSGVKQTLNFDLLKLAGDVESNPG |
| | PDMRPEIWIAQELRRIGDEFNAYYARRGSGVKQTLNFDLLKLAGDVESNPG |
| | PDMRPEIWIAQELRRIGDEFNAYYARRGSGVKQTLNFDLLKLAGDVESNPG |
| | PDMRPEIWIAQELRRIGDEFNAYYARRGSGVKQTLNFDLLKLAGDVESNPG |
| | PDMRPEIWIAQELRRIGDEFNAYYARRGSGVKQTLNFDLLKLAGDVESNPG |
| | PDMRPEIWIAQELRRIGDEFNAYYARRGSGVKQTLNFDLLKLAGDVESNPG |
| | PDMRPEIWIAQELRRIGDEFNAYYARRGSGVKQTLNFDLLKLAGDVESNPG |
| | PDMRPEIWIAQELRRIGDEFNAYYARRGSGVKQTLNFDLLKLAGDVESNPG |
| | PDMRPEIWIAQELRRIGDEFNAYYARRGSGVKQTLNFDLLKLAGDVESNPG |
| | PDMRPEIWIAQELRRIGDEFNAYYARRGSGVKQTLNFDLLKLAGDVESNPG |
| | P |
| | ((BimBH3.F2A)\hat{ }10, (BimBH3.F2A)\hat{ }10_DX without the v5 tag) |
| 210 | MEEQWAREIGAQLRRMADDLNAQYERRGSGVKQTLNFDLLKLAGDVESNP |
| | GPDMRPEIWIAQELRRIGDEFNAYYARRGSGVKQTLNFDLLKLAGDVESNPG |
| | PEEQWAREIGAQLRRMADDLNAQYERRGSGVKQTLNFDLLKLAGDVESNPG |
| | PDMRPEIWIAQELRRIGDEFNAYYARRGSGVKQTLNFDLLKLAGDVESNPGP |
| | EEQWAREIGAQLRRMADDLNAQYERRGSGVKQTLNFDLLKLAGDVESNPGP |
| | DMRPEIWIAQELRRIGDEFNAYYARRGSGVKQTLNFDLLKLAGDVESNPGP |
| | ((Puma-P2A-BimBH3-F2A)\hat{ }3 without the v5 tag) |
| 211 | MEEQWAREIGAQLRRMADDLNAQYERRGSGVKQTLNFDLLKLAGDVESNP |
| | GPDMRPEIWIAQELRRIGDEFNAYYARRGSGVKQTLNFDLLKLAGDVESNPG |
| | PEEQWAREIGAQLRRMADDLNAQYERRGSGVKQTLNFDLLKLAGDVESNPG |
| | PDMRPEIWIAQELRRIGDEFNAYYARRGSGVKQTLNFDLLKLAGDVESNPGP |
| | EEQWAREIGAQLRRMADDLNAQYERRGSGVKQTLNFDLLKLAGDVESNPGP |
| | DMRPEIWIAQELRRIGDEFNAYYARRGSGVKQTLNFDLLKLAGDVESNPGPE |
| | EQWAREIGAQLRRMADDLNAQYERRGSGVKQTLNFDLLKLAGDVESNPGPD |
| | MRPEIWIAQELRRIGDEFNAYYARRGSGVKQTLNFDLLKLAGDVESNPGPEE |
| | QWAREIGAQLRRMADDLNAQYERRGSGVKQTLNFDLLKLAGDVESNPGPD |
| | MRPEIWIAQELRRIGDEFNAYYARRGSGVKQTLNFDLLKLAGDVESNPGP |
| | ((Puma-F2A-BimBH3-F2A)\hat{ }5, (Puma-F2A-BimBH3F2A)\hat{ }5_DX without the v5 tag) |
| 212 | MEEQWAREIGAQLRRMADDLNAQYERRGSGVKQTLNFDLLKLAGDVESN |
| | PGPDMRPEIWIAQELRRIGDEFNAYYARRGSGVKQTLNFDLLKLAGDVESN |
| | PGPEEQWAREIGAQLRRMADDLNAQYERRGSGVKQTLNFDLLKLAGDVES |
| | NPGPDMRPEIWIAQELRRIGDEFNAYYARRGSGVKQTLNFDLLKLAGDVEN |
| | PGPEEQWAREIGAQLRRMADDLNAQYERRGSGVKQTLNFDLLKLAGDVES |
| | NPGPDMRPEIWIAQERRIGDEFNAYYARRGSGVKQTLNFDLLKLAGDVESN |
| | PGPEEQWAREIGAQLRRMADDLNAQYERRGSGVKQTLNFDLLKLAGDVES |
| | NPGPDMRPEIWIAQELRRIGDEFNAYYARRGSGVKQTLNFDLLKLAGDVES |
| | NPGPEEQWAREIGAQLRRMADDLNAQYERRGSGVKQTLNFDLLKLAGDVE |
| | SNPGPDMRPEIWIAQELRRIGDEFNAYYARRGSGVKQTLNFDLLKLAGDVE |
| | SNPGPEEQWAREIGAQLRRMADDLNAQYERRGSGVKQTLNFDLLKLAGDV |
| | ESNPGPDMRPEIWIAQELRRIGDEFNAYYARRGSGVKQTLNFDLLKLAGDV |
| | ESNPGPEEQWAREIGAQLRRMADDLNAQYERRGSGVKQTLNFDLLKLAGD |
| | VESNPGPDMRPEIWIAQELRRIGDEFNAYYARRGSGVKQTLNFDLLKLAGD |
| | VESNPGPEEQWAREIGAQLRRMADDLNAQYERRGSGVKQTLNFDLLKLAG |
| | DVESNPGPDMRPEIWIAQELRRIGDEFNAYYARRGSGVKQTLNFDLLKLAG |
| | DVESNPGPEEQWAREIGAQLRRMADDLNAQYERRGSGVKQTLNFDLLKLA |
| | GDVESNPGPDMRPEIWIAQELRRIGDEFNAYYARRGSGVKQTLNFDLLKLA |
| | GDVESNPGPEEQWAREIGAQLRRMADDLNAQYERRGSGVKQTLNFDLLKL |
| | AGDVESNPGPDMRPEIWIAQELRRIGDEFNAYYARRGSGVKQTLNFDLLKL |
| | AGDVESNPGP |
| | ((Puma-F2A-BimBH3-F2A)\hat{ }10 without the v5 tag) |
| 213 | MQWAREIGAQLRRIGDDLNAQYERRRQGSGVKQTLNFDLLKLAGDVESNP |
| | GPQWAREIGAQLRRIGDDLNAQYERRRQGSGVKQTLNFDLLKLAGDVESN |
| | PGPQWAREIGAQLRRIGDDLNAQYERRRQGSGVKQTLNFDLLKLAGDVES |
| | NPGPQWAREIGAQLRRIGDDLNAQYERRRQGSGVKQTLNFDLLKLAGDES |
| | NPGPQWAREIGAQLRRIGDDLNAQYERRRQGSGVKQTLNFDLLKLAGDVE |
| | SNPGPQWAREIGAQLRRIGDDLNAQYERRRQGSGVKQTLNFDLLKLAGDV |
| | ESNPGPQWAREIGAQLRRIGDDLNAQYERRRQGSGVKQTLNFDLLKLAGD |
| | VESNPGPQWAREIGAQLRRIGDDLNAQYERRRQGSGVKQTLNFDLLKLAG |
| | DVESNPGPQWAREIGAQLRRIGDDLNAQYERRRQGSGVKQTLNFDLLKLA |
| | GDVESNPGPQWAREIGAQLRRIGDDLNAQYERRRQGSGVKQTLNFDLLKL |
| | AGDVESNPGP |
| | ((SuperPumaBH3.F2A)\hat{ }10, (SuperPumaBH3.F2A)\hat{ }10_DX without the v5 tag) |
| 214 | MQWAREIGAQERREADDENAQYERRRQGSGVKQTLNFDLLKLAGDVESNP |
| | GPQWAREIGAQERREADDENAQYERRRQGSGVKQTLNFDLLKLAGDVESN |
| | PGPQWAREIGAQERREADDENAQYERRRQGSGVKQTLNFDLLKLAGDVES |
| | NPGPQWAREIGAQERREADDENAQYERRRQGSGVKQTLNFDLLKLAGDVE |
| | SNPGPQWAREIGAQERREADDENAQYERRRQGSGVKQTLNFDLLKLAGDV |
| | ESNPGPQWAREIGAQERREADDENAQYERRRQGSGVKQTLNFDLLKLAGD |
| | VESNPGPQWAREIGAQERREADDENAQYERRRQGSGVKQTLNFDLLKLAG |
| | DVESNPGPQWAREIGAQERREADDENAQYERRRQGSGVKQTLNFDLLKLA |
| | GDVESNPGPQWAREIGAQERREADDENAQYERRRQGSGVKQTLNFDLLKL |
| | AGDVESNPGPQWAREIGAQERREADDENAQYERRRQGSGVKQTLNFDLLK |
| | LAGDVESNPGPQWAREIGAQERREADDENAQYERRRQGSGVKQTLNFDLL |
| | KLAGDVESNPGP |
| | ((KittyCatBH3.F2A)\hat{ }10, (KittyCatBH3.F2A)\hat{ }10_DX without the v5 tag) |
| 215 | MQWAREIGAQERREADDENAQYERRRQGSGVKQTLNFDLLKLAGDVESNP |
| | GPQWAREIGAQERREADDENAQYERRRQGSGVKQTLNFDLLKLAGDVESN |
| | PGPQWAREIGAQERREADDENAQYERRRQGSGVKQTLNFDLLKLAGDVES |
| | NPGPQWAREIGAQERREADDENAQYERRRQGSGVKQTLNFDLLKLAGDVE |
| | SNPGPQWAREIGAQERREADDENAQYERRRQGSGVKQTLNFDLLKLAGDV |
| | ESNPGPQWAREIGAQERREADDENAQYERRRQGSGVKQTLNFDLLKLAGD |
| | VESNPGPQWAREIGAQERREADDNAQYERRRQGSGVKQTLNFDLLKLAGD |
| | VESNPGPQWAREIGAQERREADDENAQYERRRQGSGVKQTLNFDLLKLAG |
| | DVESNPGPQWAREIGAQERREADDENAQYERRRQGSGVKQTLNFDLLKLA |
| | GDVESNPGPQWAREIGAQERREADDENAQYERRRQGSGVKQTLNFDLLKL |
| | AGDVESNPGPQWAREIGAQERREADDENAQYERRRQGSGVKQTLNFDLLK |
| | LAGDVESNPGP |
| | ((KittyCatBH3.F2A)\hat{ }10, (KittyCatBH3.F2A)\hat{ }10_DX without the v5 tag) |
| 216 | MPAELEVECATQLRRFGDKLNFRQKLLGSGVKQTLNFDLLKLAGDVESNPGP |
| | PAELEVECATQLRRFGDKLNFRQKLLGSGVKQTLNFDLLKLAGDVESNPGPP |
| | AELEVECATQLRRFGDKLNFRQKLLGSGVKQTLNFDLLKLAGDVESNPGPPA |
| | ELEVECATQLRRFGDKLNFRQKLLGSGVKQTLNFDLLKLAGDVESNPGPPAE |
| | LEVECATQLRRFGDKLNFRQKLLGSGVKQTLNFDLLKLAGDVESNPGPPAEL |
| | EVECATQLRRFGDKLNFRQKLLGSGVKQTLNFDLLKLAGDVESNPGP |
| | ((NoxaBH3.F2A)\hat{ }5, (NoxaBH3.F2A)\hat{ }5_DX without the v5 tag) |
| 217 | MPAELEVECATQLRRFGDKLNFRQKLLGSGVKQTLNFDLLKLAGDVESNPGP |
| | PAELEVECATQLRRFGDKLNFRQKLLGSGVKQTLNFDLLKLAGDVESNPGPP |
| | AELEVECATQLRRFGDKLNFRQKLLGSGVKQTLNFDLLKLAGDVESNPGPPA |
| | ELEVECATQLRRFGDKLNFRQKLLGSGVKQTLNFDLLKLAGDVESNPGPPAE |
| | LEVECATQLRRFGDKLNFRQKLLGSGVKQTLNFDLLKLAGDVESNPGPPAEL |
| | EVECATQLRRFGDKLNFRQKLLGSGVKQTLNFDLLKLAGDVESNPGPPAELE |
| | VECATQLRRFGDKLNFRQKLLGSGVKQTLNFDLLKLAGDVESNPGPPAELEV |
| | ECATQLRRFGDKLNFRQKLLGSGVKQTLNFDLLKLAGDVESNPGPPAELEVE |
| | CATQLRRFGDKLNFRQKLLGSGVKQTLNFDLLKLAGDVESNPGPPAELEVEC |
| | ATQLRRFGDKLNFRQKLLGSGVKQTLNFDLLKLAGDVESNPGPPAELEVECA |
| | TQLRRFGDKLNFRQKLLGSGVKQTLNFDLLKLAGDVESNPGP |
| | ((NoxaBH3.F2A)\hat{ }10, (NoxaBH3.F2A)\hat{ }10_DX without the v5 tag) |
| 218 | MNLWAAQRYGRELRRMSDEFVDSFKKGGSGVKQTLNFDLLKLAGDVESNP |
| | GPNLWAAQRYGRELRRMSDEFVDSFKKGGSGVKQTLNFDLLKLAGDVESNP |
| | GPNLWAAQRYGRELRRMSDEFVDSFKKGGSGVKQTLNFDLLKLAGDVESNP |
| | GPNLWAAQRYGRELRRMSDEFVDSFKKGGSGVKQTLNFDLLKLAGDVESNP |
| | GPNLWAAQRYGRELRRMSDEFVDSFKKGGSGVKQTLNFDLLKLAGDVESNP |
| | GPNLWAAQRYGRELRRMSDEFVDSFKKGGSGVKQTLNFDLLKLAGDVESNP |
| | GPNLWAAQRYGRELRRMSDEFVDSFKKGGSGVKQTLNFDLLKLAGDVESNP |
| | GPNLWAAQRYGRELRRMSDEFVDSFKKGGSGVKQTLNFDLLKLAGDVESNP |
| | GPNLWAAQRYGRELRRMSDEFVDSFKKGGSGVKQTLNFDLLKLAGDVESNP |
| | GPNLWAAQRYGRELRRMSDEFVDSFKKGGSGVKQTLNFDLLKLAGDVESNP |
| | GP |
| | ((BadBH3.F2A)\hat{ }10,(BadBH3.F2A)\hat{ }10_DX without the v5 tag) |
| 219 | MPAELEVECATQLRRFGDKLNFRQKLLGSGVKQTLNFDLLKLAGDVESNPGP |
| | NLWAAQRYGRELRRMSDEFVDSFKKGGSGVKQTLNFDLLKLAGDVESNPGP |
| | PAELEVECATQLRRFGDKLNFRQKLLGSGVKQTLNFDLLKLAGDVESNPGPN |
| | LWAAQRYGRELRRMSDEFVDSFKKGGSGVKQTLNFDLLKLAGDVESNPGPP |
| | AELEVECATQLRRFGDKLNFRQKLLGSGVKQTLNFDLLKLAGDVESNPGPNL |
| | WAAQRYGRELRRMSDEFVDSFKKGGSGVKQTLNFDLLKLAGDVESNPGPPA |
| | ELEVECATQLRRFGDKLNFRQKLLGSGVKQTLNFDLLKLAGDVESNPGPNL |
| | WAAQRYGRELRRMSDEFVDSFKKGGSGVKQTLNFDLLKLAGDVESNPGPPA |
| | ELEVECATQLRRFGDKLNFRQKLLGSGVKQTLNFDLLKLAGDVESNPGPNL |
| | WAAQRYGRELRRMSDEFVDSFKKGGSGVKQTLNFDLLKLAGDVESNPGP |
| | ((Noxa-F2A-BadBH3-F2A)\hat{ }5, (Noxa-F2A-BadBH3-F2A)\hat{ }5_DX without the v5 tag) |
| 220 | MPAELEVECATQLRRFGDKLNFRQKLLGSGVKQTLNFDLLKLAGDVESNPG |
| | PNLWAAQRYGRELRRMSDEFVDSFKKGGSGVKQTLNFDLLKLAGDVESNP |
| | GPPAELEVECATQLRRFGDKLNFRQKLLGSGVKQTLNFDLLKLAGDVESNP |
| | GPNLWAAQRYGRELRRMSDEFVDSFKKGGSGVKQTLNFDLLKLAGDVESN |
| | GPPAELEVECATQLRRFGDKLNFRQKLLGSGVKQTLNFDLLKLAGDVESNP |
| | GPNLWAAQRYGRELRRMSDEFVDSFKKGGSGVKQTLNFDLLKLAGDVESN |
| | PGPPAELEVECATQLRRFGDKLNFRQKLLGSGVKQTLNFDLLKLAGDVESN |
| | PGPNLWAAQRYGRELRRMSDEFVDSFKKGGSGVKQTLNFDLLKLAGDVES |
| | NPGPPAELEVECATQLRRFGDKLNFRQKLLGSGVKQTLNFDLLKLAGDVES |
| | NPGPNLWAAQRYGRELRRMSDEFVDSFKKGGSGVKQTLNFDLLKLAGDVE |
| | SNPGPPAELEVECATQLRRFGDKLNFRQKLLGSGVKQTLNFDLLKLAGDVE |
| | SNPGPNLWAAQRYGRELRRMSDEFVDSFKKGGSGVKQTLNFDLLKLAGDV |
| | ESNPGPPAELEVECATQLRRFGDKLNFRQKLLGSGVKQTLNFDLLKLAGDV |
| | ESNPGPNLWAAQRYGRELRRMSDEFVDSFKKGGSGVKQTLNFDLLKLAGD |
| | VESNPGPPAELEVECATQLRRFGDKLNFRQKLLGSGVKQTLNFDLLKLAGD |
| | VESNPGPNLWAAQRYGRELRRMSDEFVDSFKKGGSGVKQTLNFDLLKLAG |
| | DVESNPGPPAELEVECATQLRRFGDKLNFRQKLLGSGVKQTLNFDLLKLAG |
| | DVESNPGPNLWAAQRYGRELRRMSDEFVDSFKKGGSGVKQTLNFDLLKLA |
| | GDVESNPGPPAELEVECATQLRRFGDKLNFRQKLLGSGVKQTLNFDLLKLA |
| | GDVESNPGPNLWAAQRYGRELRRMSDEFVDSFKKGGSGVKQTLNFDLLKL |
| | AGDVESNPGP |
| | ((Noxa-F2A-BadBH3-F2A)\hat{ }10 without the v5 tag) |
| 221 | MEEQWAREIGAQLRRMADDLNAQYERRGSGVKQTLNFDLLKLAGDVESNP |
| | GPDMRPEIWIAQELRRIGDEFNAYYARRGSGVKQTLNFDLLKLAGDVESNPG |
| | PEEQWAREIGAQLRRMADDLNAQYERRGSGVKQTLNFDLLKLAGDVESNPG |
| | PDMRPEIWIAQELRRIGDEFNAYYARRGSGVKQTLNFDLLKLAGDVESNPGP |
| | EEQWAREIGAQLRRMADDLNAQYERRGSGVKQTLNFDLLKLAGDVESNPGP |
| | DMRPEIWIAQELRRIGDEFNAYYARRGSGVKQTLNFDLLKLAGDVESNPGP |
| | ((Puma-F2A-BimBH3-F2A)\hat{ }3_DX without the v5 tag) |
| 222 | MQWAREIGAQLRRIGDDLNAQYERRRQGSGVKQTLNFDLLKLAGDVESNPG |
| | PQWAREIGAQLRRIGDDLNAQYERRRQGSGVKQTLNFDLLKLAGDVESNPG |
| | PQWAREIGAQLRRIGDDLNAQYERRRQGSGVKQTLNFDLLKLAGDVESNPG |
| | PGSGVKQTLNFDLLKLAGDVESNPGP |
| | ((SuperPumaBH3.F2A)\hat{ }3_DNA2.0 without the v5 tag) |
| 223 | MEEQWAREIGAQLRRMADDLNAQYERRGSGVKQTLNFDLLKLAGDVESNP |
| | GPDMRPEIWIAQELRRIGDEFNAYYARRGSGVKQTLNFDLLKLAGDVESNPG |
| | PEEQWAREIGAQLRRMADDLNAQYERRGSGVKQTLNFDLLKLAGDVESNPG |
| | PDMRPEIWIAQELRRIGDEFNAYYARRGSGVKQTLNFDLLKLAGDVESNPGP |
| | EEQWAREIGAQLRRMADDLNAQYERRGSGVKQTLNFDLLKLAGDVESNPGP |
| | DMRPEIWIAQELRRIGDEFNAYYARRGSGVKQTLNFDLLKLAGDVESNPGP |
| | ((Puma-F2A-BimBH3-F2A)\hat{ }3_DX DNA2.0 without the v5 tag) |
| 224 | MQWAREIGAQLRRIGDDLNAQYERRRQGSGVKQTLNFDLLKLAGDVESNPG |
| | PQWAREIGAQLRRIGDDLNAQYERRRQGSGVKQTLNFDLLKLAGDVESNPG |
| | PQWAREIGAQLRRIGDDLNAQYERRRQGSGVKQTLNFDLLKLAGDVESNPG |
| | PQWAREIGAQLRRIGDDLNAQYERRRQGSGVKQTLNFDLLKLAGDVESNPG |
| | PQWAREIGAQLRRIGDDLNAQYERRRQGSGVKQTLNFDLLKLAGDVESNPG |
| | P |
| | ((SuperPumaBH3.F2A)\hat{ }5_DNA2.0 without the v5 tag) |
| 225 | MEEQWAREIGAQLRRMADDLNAQYERRGSGVKQTLNFDLLKLAGDVESNP |
| | GPEEQWAREIGAQLRRMADDLNAQYERRGSGVKQTLNFDLLKLAGDVESNP |
| | GPEEQWAREIGAQLRRMADDLNAQYERRGSGVKQTLNFDLLKLAGDVESNP |
| | GPEEQWAREIGAQLRRMADDLNAQYERRGSGVKQTLNFDLLKLAGDVESNP |
| | GPEEQWAREIGAQLRRMADDLNAQYERRGSGVKQTLNFDLLKLAGDVESNP |
| | GP |
| | ((pumaBH3.F2A)\hat{ }5_DNA2.0 without the v5 tag) |
| 226 | MQWAREIGAQERREADDENAQYERRRQGSGVKQTLNFDLLKLAGDVESNP |
| | GPQWAREIGAQERREADDENAQYERRRQGSGVKQTLNFDLLKLAGDVESN |
| | PGPQWAREIGAQERREADDENAQYERRRQGSGVKQTLNFDLLKLAGDVES |
| | NPGPQWAREIGAQERREADDENAQYERRRQGSGVKQTLNFDLLKLAGDVE |
| | SNPGPQWAREIGAQERREADDENAQYERRRQGSGVKQTLNFDLLKLAGDV |
| | ESNPGP |
| | ((KittyCatBH3.F2A)\hat{ }5_DNA2.0 without the v5 tag) |
| 227 | MQWAREIGAQERREADDENAQYERRRQGSGVKQTLNFDLLKLAGDVESNP |
| | GPQWAREIGAQERREADDENAQYERRRQGSGVKQTLNFDLLKLAGDVESN |
| | PGPQWAREIGAQERREADDENAQYERRRQGSGVKQTLNFDLLKLAGDVES |
| | NPGPQWAREIGAQERREADDENAQYERRRQGSGVKQTLNFDLLKLAGDVE |
| | SNPGPQWAREIGAQERREADDENAQYERRRQGSGVKQTLNFDLLKLAGDV |
| | ESNPGPQWAREIGAQERREADDENAQYERRRQGSGVKQTLNFDLLKLAGD |
| | VESNPGPQWAREIGAQERREADDENAQYERRRQGSGVKQTLNFDLLKLAG |
| | DVESNPGPQWAREIGAQERREADDENAQYERRRQGSGVKQTLNFDLLKLA |
| | GDVESNPGPQWAREIGAQERREADDENAQYERRRQGSGVKQTLNFDLLKL |
| | AGDVESNPGPQWAREIGAQERREADDENAQYERRRQGSGVKQTLNFDLLK |
| | LAGDVESNPGPQWAREIGAQERREADDENAQYERRRQGSGVKQTLNFDLL |
| | KLAGDVESNPGP |
| | (KittyCatBH3.F2A)\hat{ }10_DNA2.0 without the v5 tag) |
| 228 | MEEQWAREIGAQLRRMADDLNAQYERRGSGVKQTLNFDLLKLAGDVESNP |
| | GPEEQWAREIGAQLRRMADDLNAQYERRGSGVKQTLNFDLLKLAGDVESNP |
| | GPEEQWAREIGAQLRRMADDLNAQYERRGSGVKQTLNFDLLKLAGDVESNP |
| | GPEEQWAREIGAQLRRMADDLNAQYERRGSGVKQTLNFDLLKLAGDVESNP |
| | GPEEQWAREIGAQLRRMADDLNAQYERRGSGVKQTLNFDLLKLAGDVESNP |
| | GPEEQWAREIGAQLRRMADDLNAQYERRGSGVKQTLNFDLLKLAGDVESNP |
| | GPEEQWAREIGAQLRRMADDLNAQYERRGSGVKQTLNFDLLKLAGDVESNP |
| | GPEEQWAREIGAQLRRMADDLNAQYERRGSGVKQTLNFDLLKLAGDVESNP |
| | GPEEQWAREIGAQLRRMADDLNAQYERRGSGVKQTLNFDLLKLAGDVESNP |
| | GPEEQWAREIGAQLRRMADDLNAQYERRGSGVKQTLNFDLLKLAGDVESNP |
| | GP |
| | ((pumaBH3.F2A)\hat{ }10_DNA2.0 without the v5 tag) |
| 229 | MEEQWAREIGAQLRRMADDLNAQYERRGSGVKQTLNFDLLKLAGDVESNP |
| | GPDMRPEIWIAQELRRIGDEFNAYYARRGSGVKQTLNFDLLKLAGDVESNPG |
| | PEEQWAREIGAQLRRMADDLNAQYERRGSGVKQTLNFDLLKLAGDVESNPG |
| | PDMRPEIWIAQELRRIGDEFNAYYARRGSGVKQTLNFDLLKLAGDVESNPGP |
| | EEQWAREIGAQLRRMADDLNAQYERRGSGVKQTLNFDLLKLAGDVESNPGP |
| | DMRPEIWIAQELRRIGDEFNAYYARRGSGVKQTLNFDLLKLAGDVESNPGPE |
| | EQWAREIGAQLRRMADDLNAQYERRGSGVKQTLNFDLLKLAGDVESNPGPD |
| | MRPEIWIAQELRRIGDEFNAYYARRGSGVKQTLNFDLLKLAGDVESNPGPEE |
| | QWAREIGAQLRRMADDLNAQYERRGSGVKQTLNFDLLKLAGDVESNPGPD |
| | MRPEIWIAQELRRIGDEFNAYYARRGSGVKQTLNFDLLKLAGDVESNPGP |
| | ((Puma-F2A-BimBH3-F2A)\hat{ }5_DNA2.0 without the v5 tag) |
| 230 | MQWAREIGAQLRRIGDDLNAQYERRRQGSGVKQTLNFDLLKLAGDVESNP |
| | GPQWAREIGAQLRRIGDDLNAQYERRRQGSGVKQTLNFDLLKLAGDVESN |
| | PGPQWAREIGAQLRRIGDDLNAQYERRRQGSGVKQTLNFDLLKLAGDVES |
| | NPGPQWAREIGAQLRRIGDDLNAQYERRRQGSGVKQTLNFDLLKLAGDVE |
| | SNPGPQWAREIGAQLRRIGDDLNAQYERRRQGSGVKQTLNFDLLKLAGDV |
| | ESNPGPQWAREIGAQLRRIGDDLNAQYERRRQGSGVKQTLNFDLLKLAGD |
| | VESNPGPQWAREIGAQLRRIGDDLNAQYERRRQGSGVKQTLNFDLLKLAG |
| | DVESNPGPQWAREIGAQLRRIGDDLNAQYERRRQGSGVKQTLNFDLLKLA |
| | GDVESNPGPQWAREIGAQLRRIGDDLNAQYERRRQGSGVKQTLNFDLLKL |
| | AGDVESNPGPQWAREIGAQLRRIGDDLNAQYERRRQGSGVKQTLNFDLLK |
| | LAGDVESNPGP |
| | ((SuperPumaBH3.F2A)\hat{ }10_DNA2.0 without the v5 tag) |
| 231 | MQWAREIGAQERREADDENAQYERRRQGSGVKQTLNFDLLKLAGDVESNP |
| | GPQWAREIGAQERREADDENAQYERRRQGSGVKQTLNFDLLKLAGDVESNP |
| | GPQWAREIGAQERREADDENAQYERRRQGSGVKQTLNFDLLKLAGDVESNP |
| | GP |
| | ((KittyCatBH3.F2A)\hat{ }3 without the v5 tag) |
| 232 | MQWAREIGAQERREADDENAQYERRRQGSGATNFSLLKQAGDVEENPGPQ |
| | WAREIGAQERREADDENAQYERRRQGSGATNFSLLKQAGDVEENPGPQWA |
| | REIGAQERREADDENAQYERRRQGSGVKQTLNFDLLKLAGDVESNPGP |
| | ((KittyCatBH3.P2A)\hat{ }3 without the v5 tag) |
| 233 | MEEQWAREIGAQLRRMADDLNAQYERRGSGATNFSLLKQAGDVEENPGPEE |
| | QWAREIGAQLRRMADDLNAQYERRGSGATNFSLLKQAGDVEENPGPEEQW |
| | AREIGAQLRRMADDLNAQYERR |
| | (PumaBH3(x3.P2A)_miR122 without the v5 tag) |
| 234 | MEEQWAREIGAQLRRMADDLNAQYERRGGGSGGGSGGGSEEQWAREIGAQ |
| | LRRMADDLNAQYERRGGGSGGGSGGGSEEQWAREIGAQLRRMADDLNAQY |
| | ERR |
| | ((PUMA BH3.GGGSx3)x3 without the v5 tag) |
| 235 | MEEQWAREIGAQLRRMADDLNAQYERRGGGSGGGSGGGSEEQWAREIGAQ |
| | LRRMADDLNAQYERRGGGSGGGSGGGSEEQWAREIGAQLRRMADDLNAQY |
| | ERR |
| | ((PUMA BH3.GGGSx3)x3_DX without the v5 tag) |
| 236 | MEEQWAREIGAQLRRMADDLNAQYERRGGGSGGGSGGGSEEQWAREIGAQ |
| | LRRMADDLNAQYERR (PUMA BH3.GGGSx3.PUMA BH3 without the v5 tag) |
| 237 | MEEQWAREIGAQLRRMADDLNAQYERRGSGATNFSLLKQAGDVEENPGPEE |
| | QWAREIGAQLRRMADDLNAQYERRGSGATNFSLLKQAGDVEENPGPEEQW |
| | AREIGAQLRRMADDLNAQYERR |
| | (PumaBH3(x3.P2A)_miR122 without the v5 tag) |
| 238 | ATGGAGGAGCAGTGGGCTCGAGAGATCGGAGCCCAATTGAGGAGGATGG |
| | CGGATGACCTCAATGCACAGTACGAACGTAGG |
| | (PumaBH3_HS3UPCRfree) |
| 239 | ATGCACCATCATCATCACCACGAAGAGCAATGGGCGCGGGAAATTGGAG |
| | CCCAGCTGCGGAGAATGGCTGATGATTTGAACGCGCAGTATGAAAGACGT |
| | (PumaBH3.nHIS_HS3UPCRfree) |
| 240 | ATGGGTAAGCCTATCCCAAACCCTCTGCTGGGGCTCGACTCTACAGAGGA |
| | ACAATGGGCACGAGAGATCGGGGCTCAGTTACGACGTATGGCGGACGAC |
| | CTGAACGCCCAGTATGAGCGAAGG |
| | (PumaBH3.nV5_HS3UPCRfree) |
| 241 | ATGGAGGAACAGTGGGCAAGAGAGATTGGCGCGCAGTTGAGGAGAATGG |
| | CAGATGACCTGAATGCTCAATATGAGAGACGGCACCATCATCATCATCAT |
| | (PumaBH3.cHIS_HS3UPCRfree) |
| 242 | ATGGAAGAACAGTGGGCAAGAGAAATCGGAGCACAGCTGCGACGGATG |
| | GCCGACGACTTGAACGCGCAGTATGAAAGAAGAGGAAGCGGCGTGAAA |
| | CAGACACTGAACTTCGACCTTCTGAAACTGGCAGGTGATGTGGAATCAA |
| | ATCCTGGTCCCGAAGAGCAATGGGCCAGAGAGATCGGCGCCCAGCTTCG |
| | GCGCATGGCCGACGATCTTAATGCCCAGTACGAACGGCGGGGGTCTGGA |
| | GTGAAACAAACTCTGAACTTCGATCTCCTGAAACTAGCGGGGGACGTTG |
| | AGTCCAACCCGGGGCCTGAGGAACAATGGGCCCGCGAGATCGGCGCCC |
| | AATTGAGACGTATGGCCGACGATCTAAATGCCCAGTACGAACGGCGCGG |
| | CAAGCCTATTCCAAATCCGTTGTTGGGGCTGGACAGCACA |
| | (PumaBH3(x3.F2A).v5_Hs3UPCRfree) |
| 243 | ATGGAGGAGCAGTGGGCTAGGGAAATAGGCGCCCAGCTCAGACGGATGG |
| | CGGACGATCTCAATGCACAATACGAAAGGCGGGGAAAGCCAATCCCAAA |
| | TCCGCTCCTGGGGTTGGACAGTACT |
| | (PumaBH3.cV5_HS3UPCRfree) |
| 244 | ATGGAGGAGCAATGGGCTAGAGAGATCGGCGCACAGCTGCGGCGCATG |
| | GCCGATGATCTGAACGCCCAATACGAGAGGAGAGGTTCCGGAGTGAAG |
| | CAGACTCTGAACTTCGATCTGCTCAAGCTTGCGGGCGACGTGGAATCGA |
| | ACCCCGGCCCTGAGGAACAATGGGCGCGCGAAATCGGTGCCCAGCTCCG |
| | CCGGATGGCAGACGACCTGAACGCGCAGTACGAGCGGCGGGGGAGCGG |
| | GGTCAAGCAGACCCTGAATTTCGACCTTCTGAAGCTGGCCGGAGATGTG |
| | GAGTCAAACCCGGGACCCGAAGAACAGTGGGCCAGGGAAATTGGAGCT |
| | CAGCTGCGGAGAATGGCCGACGACCTCAACGCCCAGTACGAACGGCGC |
| | GGAAAACCTATCCCGAACCCACTCTTGGGCCTGGACTCCACC |
| | (PumaBH3(x3.F2A).v5_miR142.3p_tp) |
| 245 | ATGGAGGAGCAATGGGCTAGAGAGATCGGCGCACAGCTGCGGCGCATG |
| | GCCGATGATCTGAACGCCCAATACGAGAGGAGAGGTTCCGGAGTGAAG |
| | CAGACTCTGAACTTCGATCTGCTCAAGCTTGCGGGCGACGTGGAATCGA |
| | ACCCCGGCCCTGAGGAACAATGGGCGCGCGAAATCGGTGCCCAGCTCCG |
| | CCGGATGGCAGACGACCTGAACGCGCAGTACGAGCGGCGGGGGAGCGG |
| | GGTCAAGCAGACCCTGAATTTCGACCTTCTGAAGCTGGCCGGAGATGTG |
| | GAGTCAAACCCGGGACCCGAAGAACAGTGGGCCAGGGAAATTGGAGCT |
| | CAGCTGCGGAGAATGGCCGACGACCTCAACGCCCAGTACGAACGGCGC |
| | GGAAAACCTATCCCGAACCCACTCTTGGGCCTGGACTCCACC |
| | (PumaBH3(x3.F2A).v5_miR122/142.3p_tp) |
| 246 | ATGGAGGAGCAATGGGCTAGAGAGATCGGCGCACAGCTGCGGCGCATG |
| | GCCGATGATCTGAACGCCCAATACGAGAGGAGAGGTTCCGGAGTGAAG |
| | CAGACTCTGAACTTCGATCTGCTCAAGCTTGCGGGCGACGTGGAATCGA |
| | ACCCCGGCCCTGAGGAACAATGGGCGCGCGAAATCGGTGCCCAGCTCCG |
| | CCGGATGGCAGACGACCTGAACGCGCAGTACGAGCGGCGGGGGAGCGG |
| | GGTCAAGCAGACCCTGAATTTCGACCTTCTGAAGCTGGCCGGAGATGTG |
| | GAGTCAAACCCGGGACCCGAAGAACAGTGGGCCAGGGAAATTGGAGCT |
| | CAGCTGCGGAGAATGGCCGACGACCTCAACGCCCAGTACGAACGGCGC |
| | GGAAAACCTATCCCGAACCCACTCTTGGGCCTGGACTCCACC |
| | (PumaBH3(x3.F2A).v5_tp) |
| 247 | ATGGAGGAGCAATGGGCTAGAGAGATCGGCGCACAGCTGCGGCGCATG |
| | GCCGATGATCTGAACGCCCAATACGAGAGGAGAGGTTCCGGAGTGAAG |
| | CAGACTCTGAACTTCGATCTGCTCAAGCTTGCGGGCGACGTGGAATCGA |
| | ACCCCGGCCCTGAGGAACAATGGGCGCGCGAAATCGGTGCCCAGCTCCG |
| | CCGGATGGCAGACGACCTGAACGCGCAGTACGAGCGGCGGGGGAGCGG |
| | GGTCAAGCAGACCCTGAATTTCGACCTTCTGAAGCTGGCCGGAGATGTG |
| | GAGTCAAACCCGGGACCCGAAGAACAGTGGGCCAGGGAAATTGGAGCT |
| | CAGCTGCGGAGAATGGCCGACGACCTCAACGCCCAGTACGAACGGCGC |
| | GGAAAACCTATCCCGAACCCACTCTTGGGCCTGGACTCCACC |
| | (PumaBH3(x3.F2A).v5_miR122_tp) |
| 248 | ATGGAAGAACAATGGGCACGGGAAATTGGAGCGCAGCTGAGGAGAATG |
| | GCTGATGACCTGAACGCTCAATACGAACGCCGCGGATCCGGCGTGAAGC |
| | AGACTCTTAACTTCGACTTGCTCAAGCTCGCTGGCGATGTCGAGTCCAAC |
| | CCGGGCCCCGAGGAGCAATGGGCCCGCGAAATTGGGGCCCAGCTCCGGC |
| | GCATGGCGGACGATCTCAACGCGCAGTATGAACGGAGGGGCTCCGGAGT |
| | CAAGCAGACCCTCAACTTCGACCTCCTGAAGCTCGCCGGCGACGTGGAG |
| | AGCAACCCTGGTCCCGAAGAACAGTGGGCCAGAGAAATCGGTGCCCAG |
| | CTTCGCCGGATGGCCGACGACTTGAACGCCCAATACGAGCGGAGAGGCT |
| | CGGGAGTGAAGCAAACCCTGAACTTCGATCTGCTTAAGCTGGCTGGGGA |
| | CGTCGAATCCAACCCCGGACCTGAGGAGCAGTGGGCCCGGGAAATCGG |
| | GGCCCAACTGAGAAGGATGGCAGACGACCTGAATGCCCAGTACGAGCG |
| | CCGCGGCTCAGGAGTGAAACAGACCTTGAACTTTGACTTGCTGAAGCTG |
| | GCCGGGGACGTGGAAAGCAACCCGGGGCCAGAGGAACAGTGGGCGCGG |
| | GAGATCGGTGCTCAGCTGAGAAGAATGGCAGATGATCTGAATGCGCAGT |
| | ACGAACGGCGCGGATCTGGAGTCAAACAGACCCTGAATTTCGACCTGTT |
| | GAAACTGGCCGGAGATGTGGAATCAAACCCCGGCCCTGGAAAGCCGATC |
| | CCGAACCCACTGCTGGGGCTCGACTCCACC |
| | ((pumaBH3.F2A)\hat{ }5_cV5, (pumaBH3.F2A)\hat{ }5_cV5_DX) |
| 249 | ATGGACATGCGACCTGAGATTTGGATTGCGCAGGAACTTAGACGGATTG |
| | GCGATGAATTCAACGCATACTATGCACGGAGAGGCTCCGGCGTCAAGCA |
| | GACCCTGAACTTTGACCTCCTCAAGCTGGCGGGCGATGTGGAGAGCAAC |
| | CCCGGCCCCGATATGCGCCCAGAAATCTGGATTGCTCAAGAACTCCGCA |
| | GAATCGGCGACGAGTTTAATGCGTACTACGCCAGACGCGGAAGCGGCGT |
| | GAAGCAGACTCTTAACTTCGATCTGCTCAAACTGGCCGGCGACGTGGAG |
| | TCAAATCCTGGCCCGGATATGCGGCCCGAGATATGGATTGCCCAGGAGC |
| | TCCGCCGCATCGGGGACGAGTTCAACGCCTACTACGCACGCCGCGGGTC |
| | GGGCGTGAAACAGACCTTGAACTTTGATCTGCTGAAGCTGGCAGGGGAC |
| | GTGGAATCCAACCCGGGACCGGACATGAGGCCCGAGATCTGGATCGCCC |
| | AGGAACTGCGGAGAATCGGAGATGAGTTTAACGCCTATTACGCCCGGAG |
| | GGGATCGGGAGTCAAGCAAACCCTCAACTTCGACCTGTTGAAGCTGGCT |
| | GGAGATGTCGAATCGAACCCCGGTCCGGACATGCGGCCGGAAATTTGGA |
| | TCGCACAGGAACTGAGGAGGATTGGGGACGAATTCAATGCTTACTACGC |
| | CCGCCGCGGATCCGGAGTGAAGCAAACACTGAATTTCGACCTCCTGAAG |
| | CTTGCCGGGGACGTCGAGTCCAACCCTGGTCCTGGAAAGCCGATCCCGA |
| | ACCCTTTGCTGGGCCTGGACAGCACC |
| | ((BimBH3.F2A)\hat{ }5_cV5, (BimBH3.F2A)\hat{ }5_cV5_DX) |
| 250 | ATGCAATGGGCCAGAGAGATCGGAGCACAACTGCGGAGAATTGGAGAT |
| | GACCTGAACGCACAGTACGAACGCCGCAGACAGGGATCGGGCGTGAAG |
| | CAAACCCTCAATTTCGATCTTCTGAAATTGGCGGGCGACGTCGAGTCGA |
| | ACCCTGGTCCACAATGGGCGCGGGAAATCGGTGCCCAGCTGAGGAGAAT |
| | TGGCGATGACCTCAACGCCCAGTACGAAAGGCGGCGGCAGGGCAGCGG |
| | AGTGAAGCAGACTCTTAACTTCGACTTGCTGAAGCTGGCTGGGGACGTG |
| | GAATCCAACCCTGGACCCCAGTGGGCCCGCGAAATCGGCGCCCAGCTGC |
| | GGCGCATCGGGGACGACCTCAATGCGCAGTACGAGCGGCGGCGCCAGG |
| | GGTCCGGCGTCAAGCAGACCCTGAACTTCGACCTCCTCAAGCTGGCCGG |
| | AGATGTGGAGTCCAACCCGGGTCCCGGATCAGGGGTCAAGCAAACTCTG |
| | AACTTTGATCTGCTGAAGCTCGCTGGCGACGTGGAGAGCAACCCGGGAC |
| | CGGGAAAGCCTATTCCGAACCCCCTGCTGGGCCTGGACTCCACC |
| | ((SuperPumaBH3.F2A)\hat{ }3_cV5) |
| 251 | ATGCAATGGGCCAGAGAAATTGGAGCGCAACTCAGAAGAATCGGCGAC |
| | GATCTGAACGCTCAGTACGAAAGACGCCGCCAGGGATCCGGCGTGAAGC |
| | AAACTCTGAACTTTGACCTCCTTAAGCTCGCCGGGGATGTCGAGAGCAA |
| | TCCTGGACCGCAGTGGGCCAGGGAGATCGGTGCCCAGTTGCGGCGGATC |
| | GGCGATGATCTCAACGCCCAATATGAACGGCGGAGACAGGGAAGCGGA |
| | GTCAAGCAAACCTTGAACTTCGACCTCCTGAAGCTGGCTGGCGACGTCG |
| | AATCCAACCCTGGACCCCAGTGGGCGCGGGAAATTGGTGCCCAGCTGCG |
| | ACGGATCGGGGATGACCTCAACGCACAATACGAGAGGCGGAGGCAGGG |
| | TTCCGGCGTCAAGCAGACTCTTAATTTCGATCTCCTGAAATTGGCCGGCG |
| | ATGTGGAGTCAAACCCGGGCCCGCAATGGGCCCGCGAGATCGGCGCCCA |
| | ACTGCGGCGCATTGGCGACGACCTGAACGCCCAGTACGAGCGCAGACGC |
| | CAGGGGTCCGGAGTGAAGCAGACCCTCAACTTCGATTTGTTGAAGCTCG |
| | CGGGCGACGTGGAAAGCAATCCGGGACCACAGTGGGCTAGAGAGATCG |
| | GAGCCCAGCTGAGGCGCATTGGTGACGACCTCAATGCACAGTACGAACG |
| | GAGGCGGCAGGGTTCGGGGGTGAAACAGACCCTGAACTTCGATCTGCTC |
| | AAGCTGGCGGGAGATGTGGAATCGAACCCAGGGCCGGGAAAGCCTATT |
| | CCCAACCCTCTGCTGGGCCTGGATTCCACC |
| | ((SuperPumaBH3.F2A)\hat{ }5_cV5) |
| 252 | ATGCAATGGGCACGAGAGATTGGAGCACAGGAACGGAGAGAAGCCGAT |
| | GACGAGAACGCGCAGTACGAACGGCGGCGCCAGGGTTCCGGCGTGAAA |
| | CAGACTCTCAACTTCGACTTGCTGAAGCTCGCCGGGGACGTGGAATCCA |
| | ATCCAGGACCTCAATGGGCCCGGGAAATCGGCGCGCAGGAAAGACGCG |
| | AAGCCGACGATGAAAACGCCCAATACGAGCGGCGCAGACAGGGGTCGG |
| | GCGTGAAGCAAACGCTGAATTTCGACCTCCTGAAGTTGGCCGGAGATGT |
| | CGAGTCCAACCCTGGACCCCAGTGGGCCAGAGAGATTGGTGCCCAAGAA |
| | AGGAGAGAAGCGGATGACGAAAACGCTCAGTACGAGAGGCGCAGACAA |
| | GGCTCGGGAGTCAAGCAGACTCTGAACTTCGATCTTCTGAAGCTGGCTG |
| | GCGATGTGGAAAGCAACCCAGGACCGCAGTGGGCGCGCGAGATCGGAG |
| | CCCAGGAGAGGAGGGAGGCCGACGACGAAAATGCACAGTACGAAAGAA |
| | GGCGCCAGGGCTCCGGAGTGAAGCAGACCCTCAACTTTGACTTGCTCAA |
| | GCTGGCCGGCGACGTGGAGAGCAACCCTGGCCCGCAATGGGCTAGAGA |
| | AATCGGAGCTCAGGAGCGGCGGGAAGCAGACGACGAGAATGCGCAGTA |
| | TGAGCGCCGGCGGCAGGGAAGCGGTGTCAAGCAAACCCTGAACTTTGAT |
| | CTGCTCAAACTGGCCGGGGATGTGGAATCGAACCCCGGACCGGGGAAGC |
| | CCATCCCCAACCCGCTTCTGGGCCTGGACTCCACC |
| | ((KittyCatBH3.F2A)\hat{ }5_cV5,(KittyCatBH3.F2A)\hat{ }5_cV5_DX) |
| 253 | ATGCAATGGGCACGAGAGATTGGAGCACAGGAACGGAGAGAAGCCGATG |
| | ACGAGAACGCGCAGTACGAACGGCGGCGCCAGGGTTCCGGCGTGAAACA |
| | GACTCTCAACTTCGACTTGCTGAAGCTCGCCGGGGACGTGGAATCCAATC |
| | CAGGACCTCAATGGGCCCGGGAAATCGGCGCGCAGGAAAGACGCGAAGC |
| | CGACGATGAAAACGCCCAATACGAGCGGCGCAGACAGGGGTCGGGCGTG |
| | AAGCAAACGCTGAATTTCGACCTCCTGAAGTTGGCCGGAGATGTCGAGTC |
| | CAACCCTGGACCCCAGTGGGCCAGAGAGATTGGTGCCCAAGAAAGGAGA |
| | GAAGCGGATGACGAAAACGCTCAGTACGAGAGGCGCAGACAAGGCTCGG |
| | GAGTCAAGCAGACTCTGAACTTCGATCTTCTGAAGCTGGCTGGCGATGTG |
| | GAAAGCAACCCAGGACCGCAGTGGGCGCGCGAGATCGGAGCCCAGGAGA |
| | GGAGGGAGGCCGACGACGAAAATGCACAGTACGAAAGAAGGCGCCAGG |
| | GCTCCGGAGTGAAGCAGACCCTCAACTTTGACTTGCTCAAGCTGGCCGGC |
| | GACGTGGAGAGCAACCCTGGCCCGCAATGGGCTAGAGAAATCGGAGCTC |
| | AGGAGCGGCGGGAAGCAGACGACGAGAATGCGCAGTATGAGCGCCGGCG |
| | GCAGGGAAGCGGTGTCAAGCAAACCCTGAACTTTGATCTGCTCAAACTGG |
| | CCGGGGATGTGGAATCGAACCCCGGACCGGGGAAGCCCATCCCCAACCC |
| | GCTTCTGGGCCTGGACTCCACC |
| | ((KittyCatBH3.F2A)\hat{ }5_cV5, (KittyCatBH3.F2A)\hat{ }5_cV5_DX) |
| 254 | ATGAACCTCTGGGCAGCCCAACGCTACGGAAGAGAGCTTCGAAGAATGT |
| | CAGACGAGTTTGTCGACTCCTTCAAGAAAGGCGGTTCCGGAGTGAAGCA |
| | GACTCTGAATTTCGACCTTCTCAAGCTGGCCGGGGACGTGGAGAGCAAC |
| | CCTGGCCCAAATCTCTGGGCCGCTCAGCGGTACGGCCGGGAATTGAGAA |
| | GGATGTCGGATGAATTTGTGGATTCCTTCAAAAAGGGCGGATCCGGCGT |
| | GAAGCAAACTCTGAACTTCGACCTGTTGAAGCTTGCCGGCGACGTGGAG |
| | TCGAACCCCGGGCCGAACTTGTGGGCGGCTCAGAGATACGGTAGAGAAC |
| | TGCGGCGGATGAGCGACGAATTCGTGGACAGCTTTAAGAAGGGAGGAA |
| | GCGGAGTGAAACAAACCCTCAACTTCGATCTGCTGAAGCTCGCGGGCGA |
| | TGTCGAATCGAACCCGGGACCTAATCTGTGGGCTGCACAGCGCTACGGA |
| | CGCGAGCTGCGCCGCATGAGCGATGAGTTCGTGGACTCTTTTAAAAAGG |
| | GTGGTTCCGGCGTCAAACAGACTTTGAACTTTGACCTCCTGAAGCTTGCA |
| | GGGGATGTGGAATCCAACCCGGGGCCTAACCTGTGGGCGGCCCAAAGAT |
| | ACGGTCGGGAGCTGAGGCGCATGTCCGATGAATTCGTCGATTCGTTCAA |
| | GAAGGGGGGAAGCGGCGTGAAACAGACCCTTAACTTCGACTTGCTCAAA |
| | CTGGCGGGAGATGTGGAGTCCAACCCAGGCCCCGGAAAGCCGATCCCTA |
| | ATCCGCTGCTCGGCCTGGACTCCACC |
| | ((BadBH3.F2A)\hat{ }5_cV5) |
| 255 | ATGCCTGCCGAACTTGAAGTCGAATGCGCGACCCAGCTGAGAAGATTTG |
| | GAGACAAACTGAACTTCCGGCAAAAGCTGCTGGGCTCGGGAGTCAAACA |
| | GACTCTTAACTTCGACTTGCTGAAGCTTGCCGGCGACGTCGAGTCCAACC |
| | CGGGTCCAAACCTCTGGGCCGCCCAAAGATACGGACGGGAGCTCAGGA |
| | GAATGTCCGATGAGTTCGTGGATTCGTTCAAGAAGGGAGGTTCCGGTGT |
| | CAAGCAGACTCTGAACTTCGATCTGTTGAAGCTCGCGGGAGATGTCGAA |
| | AGCAACCCTGGTCCTCCTGCCGAGCTGGAGGTGGAATGTGCCACCCAGC |
| | TGCGCAGATTCGGGGACAAGCTCAACTTTCGGCAGAAGCTTCTCGGAAG |
| | CGGTGTGAAACAGACCCTGAATTTCGACCTCCTGAAACTTGCAGGAGAT |
| | GTGGAGTCAAACCCCGGACCGAACCTGTGGGCGGCGCAGAGATATGGA |
| | CGCGAACTGCGCCGGATGTCAGACGAGTTCGTCGACAGCTTCAAGAAAG |
| | GGGGTTCCGGAGTAAAGCAGACGCTGAACTTTGATCTGCTTAAGCTGGC |
| | TGGCGACGTGGAAAGCAATCCGGGCCCGCCGGCTGAGCTCGAAGTGGA |
| | GTGCGCAACCCAACTTCGGCGGTTCGGCGACAAGCTGAACTTCAGACAG |
| | AAGCTGTTGGGCAGCGGAGTGAAGCAGACCTTGAACTTTGACCTTCTCA |
| | AGCTGGCCGGGGATGTGGAATCCAACCCTGGGCCCAATCTGTGGGCTGC |
| | CCAGCGCTACGGAAGAGAACTGCGGCGGATGTCGGACGAATTCGTGGAC |
| | TCCTTCAAAAAGGGCGGCAGCGGCGTGAAGCAAACCCTCAATTTCGATC |
| | TGCTGAAGTTGGCCGGGGAC |
| | ((Noxa-F2A-BadBH3-F2A)\hat{ }3_cV5) |
| 256 | ATGGAGGAGCAGTGGGCCAGAGAGATCGGCGCCCAGCTGAGAAGAATGG |
| | CCGACGACCTGAACGCCCAGTACGAGAGAAGAGGCAGCGGCGTGAAGCA |
| | GACCCTGAACTTCGACCTGCTGAAGCTGGCCGGCGACGTGGAGAGCAACC |
| | CCGGCCCCGAGGAGCAGTGGGCCAGAGAGATCGGCGCCCAGCTGAGAAG |
| | AATGGCCGACGACCTGAACGCCCAGTACGAGAGAAGAGGCAGCGGCGTG |
| | AAGCAGACCCTGAACTTCGACCTGCTGAAGCTGGCCGGCGACGTGGAGA |
| | GCAACCCCGGCCCCGAGGAGCAGTGGGCCAGAGAGATCGGCGCCCAGCT |
| | GAGAAGAATGGCCGACGACCTGAACGCCCAGTACGAGAGAAGAGGCAGC |
| | GGCGTGAAGCAGACCCTGAACTTCGACCTGCTGAAGCTGGCCGGCGACGT |
| | GGAGAGCAACCCCGGCCCCGAGGAGCAGTGGGCCAGAGAGATCGGCGCC |
| | CAGCTGAGAAGAATGGCCGACGACCTGAACGCCCAGTACGAGAGAAGAG |
| | GCAGCGGCGTGAAGCAGACCCTGAACTTCGACCTGCTGAAGCTGGCCGGC |
| | GACGTGGAGAGCAACCCCGGCCCCGAGGAGCAGTGGGCCAGAGAGATCG |
| | GCGCCCAGCTGAGAAGAATGGCCGACGACCTGAACGCCCAGTACGAGAG |
| | AAGAGGCAGCGGCGTGAAGCAGACCCTGAACTTCGACCTGCTGAAGCTG |
| | GCCGGCGACGTGGAGAGCAACCCCGGCCCCGAGGAGCAGTGGGCCAGAG |
| | AGATCGGCGCCCAGCTGAGAAGAATGGCCGACGACCTGAACGCCCAGTA |
| | CGAGAGAAGAGGCAGCGGCGTGAAGCAGACCCTGAACTTCGACCTGCTG |
| | AAGCTGGCCGGCGACGTGGAGAGCAACCCCGGCCCCGAGGAGCAGTGGG |
| | CCAGAGAGATCGGCGCCCAGCTGAGAAGAATGGCCGACGACCTGAACGC |
| | CCAGTACGAGAGAAGAGGCAGCGGCGTGAAGCAGACCCTGAACTTCGAC |
| | CTGCTGAAGCTGGCCGGCGACGTGGAGAGCAACCCCGGCCCCGAGGAGC |
| | AGTGGGCCAGAGAGATCGGCGCCCAGCTGAGAAGAATGGCCGACGACCT |
| | GAACGCCCAGTACGAGAGAAGAGGCAGCGGCGTGAAGCAGACCCTGAAC |
| | TTCGACCTGCTGAAGCTGGCCGGCGACGTGGAGAGCAACCCCGGCCCCGA |
| | GGAGCAGTGGGCCAGAGAGATCGGCGCCCAGCTGAGAAGAATGGCCGAC |
| | GACCTGAACGCCCAGTACGAGAGAAGAGGCAGCGGCGTGAAGCAGACCC |
| | TGAACTTCGACCTGCTGAAGCTGGCCGGCGACGTGGAGAGCAACCCCGGC |
| | CCCGAGGAGCAGTGGGCCAGAGAGATCGGCGCCCAGCTGAGAAGAATGG |
| | CCGACGACCTGAACGCCCAGTACGAGAGAAGAGGCAGCGGCGTGAAGCA |
| | GACCCTGAACTTCGACCTGCTGAAGCTGGCCGGCGACGTGGAGAGCAACC |
| | CCGGCCCCGGCAAGCCCATCCCCAACCCCCTGCTGGGCCTGGACAGCACC |
| | ATGGAGGAGCAGTGGGCCAGAGAGATCGGCGCCCAGCTGAGAAGAATGG |
| | CCGACGACCTGAACGCCCAGTACGAGAGAAGAGGCAGCGGCGTGAAGCA |
| | GACCCTGAACTTCGACCTGCTGAAGCTGGCCGGCGACGTGGAGAGCAACC |
| | CCGGCCCCGAGGAGCAGTGGGCCAGAGAGATCGGCGCCCAGCTGAGAAG |
| | AATGGCCGACGACCTGAACGCCCAGTACGAGAGAAGAGGCAGCGGCGTG |
| | AAGCAGACCCTGAACTTCGACCTGCTGAAGCTGGCCGGCGACGTGGAGA |
| | GCAACCCCGGCCCCGAGGAGCAGTGGGCCAGAGAGATCGGCGCCCAGCT |
| | GAGAAGAATGGCCGACGACCTGAACGCCCAGTACGAGAGAAGAGGCAGC |
| | GGCGTGAAGCAGACCCTGAACTTCGACCTGCTGAAGCTGGCCGGCGACGT |
| | GGAGAGCAACCCCGGCCCCGAGGAGCAGTGGGCCAGAGAGATCGGCGCC |
| | CAGCTGAGAAGAATGGCCGACGACCTGAACGCCCAGTACGAGAGAAGAG |
| | GCAGCGGCGTGAAGCAGACCCTGAACTTCGACCTGCTGAAGCTGGCCGGC |
| | GACGTGGAGAGCAACCCCGGCCCCGAGGAGCAGTGGGCCAGAGAGATCG |
| | GCGCCCAGCTGAGAAGAATGGCCGACGACCTGAACGCCCAGTACGAGAG |
| | AAGAGGCAGCGGCGTGAAGCAGACCCTGAACTTCGACCTGCTGAAGCTG |
| | GCCGGCGACGTGGAGAGCAACCCCGGCCCCGAGGAGCAGTGGGCCAGAG |
| | AGATCGGCGCCCAGCTGAGAAGAATGGCCGACGACCTGAACGCCCAGTA |
| | CGAGAGAAGAGGCAGCGGCGTGAAGCAGACCCTGAACTTCGACCTGCTG |
| | AAGCTGGCCGGCGACGTGGAGAGCAACCCCGGCCCCGAGGAGCAGTGGG |
| | CCAGAGAGATCGGCGCCCAGCTGAGAAGAATGGCCGACGACCTGAACGC |
| | CCAGTACGAGAGAAGAGGCAGCGGCGTGAAGCAGACCCTGAACTTCGAC |
| | CTGCTGAAGCTGGCCGGCGACGTGGAGAGCAACCCCGGCCCCGAGGAGC |
| | AGTGGGCCAGAGAGATCGGCGCCCAGCTGAGAAGAATGGCCGACGACCT |
| | GAACGCCCAGTACGAGAGAAGAGGCAGCGGCGTGAAGCAGACCCTGAAC |
| | TTCGACCTGCTGAAGCTGGCCGGCGACGTGGAGAGCAACCCCGGCCCCGA |
| | GGAGCAGTGGGCCAGAGAGATCGGCGCCCAGCTGAGAAGAATGGCCGAC |
| | GACCTGAACGCCCAGTACGAGAGAAGAGGCAGCGGCGTGAAGCAGACCC |
| | TGAACTTCGACCTGCTGAAGCTGGCCGGCGACGTGGAGAGCAACCCCGGC |
| | CCCGAGGAGCAGTGGGCCAGAGAGATCGGCGCCCAGCTGAGAAGAATGG |
| | CCGACGACCTGAACGCCCAGTACGAGAGAAGAGGCAGCGGCGTGAAGCA |
| | GACCCTGAACTTCGACCTGCTGAAGCTGGCCGGCGACGTGGAGAGCAACC |
| | CCGGCCCCGGCAAGCCCATCCCCAACCCCCTGCTGGGCCTGGACAGCACC |
| | ((pumaBH3.F2A)\hat{ }10_cV5, (pumaBH3.F2A)\hat{ }10_cV5_DX) |
| 257 | ATGGACATGAGACCCGAGATCTGGATCGCCCAGGAGCTGAGAAGAATCG |
| | GCGACGAGTTCAACGCCTACTACGCCAGAAGAGGCAGCGGCGTGAAGCA |
| | GACCCTGAACTTCGACCTGCTGAAGCTGGCCGGCGACGTGGAGAGCAACC |
| | CCGGCCCCGACATGAGACCCGAGATCTGGATCGCCCAGGAGCTGAGAAG |
| | AATCGGCGACGAGTTCAACGCCTACTACGCCAGAAGAGGCAGCGGCGTG |
| | AAGCAGACCCTGAACTTCGACCTGCTGAAGCTGGCCGGCGACGTGGAGA |
| | GCAACCCCGGCCCCGACATGAGACCCGAGATCTGGATCGCCCAGGAGCTG |
| | AGAAGAATCGGCGACGAGTTCAACGCCTACTACGCCAGAAGAGGCAGCG |
| | GCGTGAAGCAGACCCTGAACTTCGACCTGCTGAAGCTGGCCGGCGACGTG |
| | GAGAGCAACCCCGGCCCCGACATGAGACCCGAGATCTGGATCGCCCAGG |
| | AGCTGAGAAGAATCGGCGACGAGTTCAACGCCTACTACGCCAGAAGAGG |
| | CAGCGGCGTGAAGCAGACCCTGAACTTCGACCTGCTGAAGCTGGCCGGCG |
| | ACGTGGAGAGCAACCCCGGCCCCGACATGAGACCCGAGATCTGGATCGC |
| | CCAGGAGCTGAGAAGAATCGGCGACGAGTTCAACGCCTACTACGCCAGA |
| | AGAGGCAGCGGCGTGAAGCAGACCCTGAACTTCGACCTGCTGAAGCTGG |
| | CCGGCGACGTGGAGAGCAACCCCGGCCCCGACATGAGACCCGAGATCTG |
| | GATCGCCCAGGAGCTGAGAAGAATCGGCGACGAGTTCAACGCCTACTAC |
| | GCCAGAAGAGGCAGCGGCGTGAAGCAGACCCTGAACTTCGACCTGCTGA |
| | AGCTGGCCGGCGACGTGGAGAGCAACCCCGGCCCCGACATGAGACCCGA |
| | GATCTGGATCGCCCAGGAGCTGAGAAGAATCGGCGACGAGTTCAACGCCT |
| | ACTACGCCAGAAGAGGCAGCGGCGTGAAGCAGACCCTGAACTTCGACCT |
| | GCTGAAGCTGGCCGGCGACGTGGAGAGCAACCCCGGCCCCGACATGAGA |
| | CCCGAGATCTGGATCGCCCAGGAGCTGAGAAGAATCGGCGACGAGTTCA |
| | ACGCCTACTACGCCAGAAGAGGCAGCGGCGTGAAGCAGACCCTGAACTT |
| | CGACCTGCTGAAGCTGGCCGGCGACGTGGAGAGCAACCCCGGCCCCGAC |
| | ATGAGACCCGAGATCTGGATCGCCCAGGAGCTGAGAAGAATCGGCGACG |
| | AGTTCAACGCCTACTACGCCAGAAGAGGCAGCGGCGTGAAGCAGACCCT |
| | GAACTTCGACCTGCTGAAGCTGGCCGGCGACGTGGAGAGCAACCCCGGCC |
| | CCGACATGAGACCCGAGATCTGGATCGCCCAGGAGCTGAGAAGAATCGG |
| | CGACGAGTTCAACGCCTACTACGCCAGAAGAGGCAGCGGCGTGAAGCAG |
| | ACCCTGAACTTCGACCTGCTGAAGCTGGCCGGCGACGTGGAGAGCAACCC |
| | CGGCCCCGGCAAGCCCATCCCCAACCCCCTGCTGGGCCTGGACAGCACCA |
| | TGGACATGAGACCCGAGATCTGGATCGCCCAGGAGCTGAGAAGAATCGG |
| | CGACGAGTTCAACGCCTACTACGCCAGAAGAGGCAGCGGCGTGAAGCAG |
| | ACCCTGAACTTCGACCTGCTGAAGCTGGCCGGCGACGTGGAGAGCAACCC |
| | CGGCCCCGACATGAGACCCGAGATCTGGATCGCCCAGGAGCTGAGAAGA |
| | ATCGGCGACGAGTTCAACGCCTACTACGCCAGAAGAGGCAGCGGCGTGA |
| | AGCAGACCCTGAACTTCGACCTGCTGAAGCTGGCCGGCGACGTGGAGAGC |
| | AACCCCGGCCCCGACATGAGACCCGAGATCTGGATCGCCCAGGAGCTGA |
| | GAAGAATCGGCGACGAGTTCAACGCCTACTACGCCAGAAGAGGCAGCGG |
| | CGTGAAGCAGACCCTGAACTTCGACCTGCTGAAGCTGGCCGGCGACGTGG |
| | AGAGCAACCCCGGCCCCGACATGAGACCCGAGATCTGGATCGCCCAGGA |
| | GCTGAGAAGAATCGGCGACGAGTTCAACGCCTACTACGCCAGAAGAGGC |
| | AGCGGCGTGAAGCAGACCCTGAACTTCGACCTGCTGAAGCTGGCCGGCGA |
| | CGTGGAGAGCAACCCCGGCCCCGACATGAGACCCGAGATCTGGATCGCCC |
| | AGGAGCTGAGAAGAATCGGCGACGAGTTCAACGCCTACTACGCCAGAAG |
| | AGGCAGCGGCGTGAAGCAGACCCTGAACTTCGACCTGCTGAAGCTGGCCG |
| | GCGACGTGGAGAGCAACCCCGGCCCCGACATGAGACCCGAGATCTGGAT |
| | CGCCCAGGAGCTGAGAAGAATCGGCGACGAGTTCAACGCCTACTACGCC |
| | AGAAGAGGCAGCGGCGTGAAGCAGACCCTGAACTTCGACCTGCTGAAGC |
| | TGGCCGGCGACGTGGAGAGCAACCCCGGCCCCGACATGAGACCCGAGAT |
| | CTGGATCGCCCAGGAGCTGAGAAGAATCGGCGACGAGTTCAACGCCTACT |
| | ACGCCAGAAGAGGCAGCGGCGTGAAGCAGACCCTGAACTTCGACCTGCT |
| | GAAGCTGGCCGGCGACGTGGAGAGCAACCCCGGCCCCGACATGAGACCC |
| | GAGATCTGGATCGCCCAGGAGCTGAGAAGAATCGGCGACGAGTTCAACG |
| | CCTACTACGCCAGAAGAGGCAGCGGCGTGAAGCAGACCCTGAACTTCGA |
| | CCTGCTGAAGCTGGCCGGCGACGTGGAGAGCAACCCCGGCCCCGACATG |
| | AGACCCGAGATCTGGATCGCCCAGGAGCTGAGAAGAATCGGCGACGAGT |
| | TCAACGCCTACTACGCCAGAAGAGGCAGCGGCGTGAAGCAGACCCTGAA |
| | CTTCGACCTGCTGAAGCTGGCCGGCGACGTGGAGAGCAACCCCGGCCCCG |
| | ACATGAGACCCGAGATCTGGATCGCCCAGGAGCTGAGAAGAATCGGCGA |
| | CGAGTTCAACGCCTACTACGCCAGAAGAGGCAGCGGCGTGAAGCAGACC |
| | CTGAACTTCGACCTGCTGAAGCTGGCCGGCGACGTGGAGAGCAACCCCGG |
| | CCCCGGCAAGCCCATCCCCAACCCCCTGCTGGGCCTGGACAGCACC |
| | ((BimBH3.F2A)\hat{ }10_cV5, (BimBH3.F2A)\hat{ }10_cV5_DX) |
| 258 | ATGGAGGAGCAGTGGGCCAGAGAGATCGGCGCCCAGCTGAGAAGAATGG |
| | CCGACGACCTGAACGCCCAGTACGAGAGAAGAGGCAGCGGCGTGAAGCA |
| | GACCCTGAACTTCGACCTGCTGAAGCTGGCCGGCGACGTGGAGAGCAACC |
| | CCGGCCCCGACATGAGACCCGAGATCTGGATCGCCCAGGAGCTGAGAAG |
| | AATCGGCGACGAGTTCAACGCCTACTACGCCAGAAGAGGCAGCGGCGTG |
| | AAGCAGACCCTGAACTTCGACCTGCTGAAGCTGGCCGGCGACGTGGAGA |
| | GCAACCCCGGCCCCGAGGAGCAGTGGGCCAGAGAGATCGGCGCCCAGCT |
| | GAGAAGAATGGCCGACGACCTGAACGCCCAGTACGAGAGAAGAGGCAGC |
| | GGCGTGAAGCAGACCCTGAACTTCGACCTGCTGAAGCTGGCCGGCGACGT |
| | GGAGAGCAACCCCGGCCCCGACATGAGACCCGAGATCTGGATCGCCCAG |
| | GAGCTGAGAAGAATCGGCGACGAGTTCAACGCCTACTACGCCAGAAGAG |
| | GCAGCGGCGTGAAGCAGACCCTGAACTTCGACCTGCTGAAGCTGGCCGGC |
| | GACGTGGAGAGCAACCCCGGCCCCGAGGAGCAGTGGGCCAGAGAGATCG |
| | GCGCCCAGCTGAGAAGAATGGCCGACGACCTGAACGCCCAGTACGAGAG |
| | AAGAGGCAGCGGCGTGAAGCAGACCCTGAACTTCGACCTGCTGAAGCTG |
| | GCCGGCGACGTGGAGAGCAACCCCGGCCCCGACATGAGACCCGAGATCT |
| | GGATCGCCCAGGAGCTGAGAAGAATCGGCGACGAGTTCAACGCCTACTA |
| | CGCCAGAAGAGGCAGCGGCGTGAAGCAGACCCTGAACTTCGACCTGCTG |
| | AAGCTGGCCGGCGACGTGGAGAGCAACCCCGGCCCCGGCAAGCCCATCC |
| | CCAACCCCCTGCTGGGCCTGGACAGCACC |
| | ((Puma-P2A-BimBH3-F2A)\hat{ }3_cV5) |
| 259 | ATGGAGGAGCAGTGGGCCAGAGAGATCGGCGCCCAGCTGAGAAGAATGG |
| | CCGACGACCTGAACGCCCAGTACGAGAGAAGAGGCAGCGGCGTGAAGCA |
| | GACCCTGAACTTCGACCTGCTGAAGCTGGCCGGCGACGTGGAGAGCAACC |
| | CCGGCCCCGACATGAGACCCGAGATCTGGATCGCCCAGGAGCTGAGAAG |
| | AATCGGCGACGAGTTCAACGCCTACTACGCCAGAAGAGGCAGCGGCGTG |
| | AAGCAGACCCTGAACTTCGACCTGCTGAAGCTGGCCGGCGACGTGGAGA |
| | GCAACCCCGGCCCCGAGGAGCAGTGGGCCAGAGAGATCGGCGCCCAGCT |
| | GAGAAGAATGGCCGACGACCTGAACGCCCAGTACGAGAGAAGAGGCAGC |
| | GGCGTGAAGCAGACCCTGAACTTCGACCTGCTGAAGCTGGCCGGCGACGT |
| | GGAGAGCAACCCCGGCCCCGACATGAGACCCGAGATCTGGATCGCCCAG |
| | GAGCTGAGAAGAATCGGCGACGAGTTCAACGCCTACTACGCCAGAAGAG |
| | GCAGCGGCGTGAAGCAGACCCTGAACTTCGACCTGCTGAAGCTGGCCGGC |
| | GACGTGGAGAGCAACCCCGGCCCCGAGGAGCAGTGGGCCAGAGAGATCG |
| | GCGCCCAGCTGAGAAGAATGGCCGACGACCTGAACGCCCAGTACGAGAG |
| | AAGAGGCAGCGGCGTGAAGCAGACCCTGAACTTCGACCTGCTGAAGCTG |
| | GCCGGCGACGTGGAGAGCAACCCCGGCCCCGACATGAGACCCGAGATCT |
| | GGATCGCCCAGGAGCTGAGAAGAATCGGCGACGAGTTCAACGCCTACTA |
| | CGCCAGAAGAGGCAGCGGCGTGAAGCAGACCCTGAACTTCGACCTGCTG |
| | AAGCTGGCCGGCGACGTGGAGAGCAACCCCGGCCCCGAGGAGCAGTGGG |
| | CCAGAGAGATCGGCGCCCAGCTGAGAAGAATGGCCGACGACCTGAACGC |
| | CCAGTACGAGAGAAGAGGCAGCGGCGTGAAGCAGACCCTGAACTTCGAC |
| | CTGCTGAAGCTGGCCGGCGACGTGGAGAGCAACCCCGGCCCCGACATGA |
| | GACCCGAGATCTGGATCGCCCAGGAGCTGAGAAGAATCGGCGACGAGTT |
| | CAACGCCTACTACGCCAGAAGAGGCAGCGGCGTGAAGCAGACCCTGAAC |
| | TTCGACCTGCTGAAGCTGGCCGGCGACGTGGAGAGCAACCCCGGCCCCGA |
| | GGAGCAGTGGGCCAGAGAGATCGGCGCCCAGCTGAGAAGAATGGCCGAC |
| | GACCTGAACGCCCAGTACGAGAGAAGAGGCAGCGGCGTGAAGCAGACCC |
| | TGAACTTCGACCTGCTGAAGCTGGCCGGCGACGTGGAGAGCAACCCCGGC |
| | CCCGACATGAGACCCGAGATCTGGATCGCCCAGGAGCTGAGAAGAATCG |
| | GCGACGAGTTCAACGCCTACTACGCCAGAAGAGGCAGCGGCGTGAAGCA |
| | GACCCTGAACTTCGACCTGCTGAAGCTGGCCGGCGACGTGGAGAGCAACC |
| | CCGGCCCCGGCAAGCCCATCCCCAACCCCCTGCTGGGCCTGGACAGCACC |
| | ((Puma-F2A-BimBH3-F2A)\hat{ }5_cV5, (Puma-F2A-BimBH3F2A)\hat{ }5_cV5_DX) |
| 260 | ATGGAGGAGCAGTGGGCCAGAGAGATCGGCGCCCAGCTGAGAAGAATGG |
| | CCGACGACCTGAACGCCCAGTACGAGAGAAGAGGCAGCGGCGTGAAGCA |
| | GACCCTGAACTTCGACCTGCTGAAGCTGGCCGGCGACGTGGAGAGCAACC |
| | CCGGCCCCGACATGAGACCCGAGATCTGGATCGCCCAGGAGCTGAGAAG |
| | AATCGGCGACGAGTTCAACGCCTACTACGCCAGAAGAGGCAGCGGCGTG |
| | AAGCAGACCCTGAACTTCGACCTGCTGAAGCTGGCCGGCGACGTGGAGA |
| | GCAACCCCGGCCCCGAGGAGCAGTGGGCCAGAGAGATCGGCGCCCAGCT |
| | GAGAAGAATGGCCGACGACCTGAACGCCCAGTACGAGAGAAGAGGCAGC |
| | GGCGTGAAGCAGACCCTGAACTTCGACCTGCTGAAGCTGGCCGGCGACGT |
| | GGAGAGCAACCCCGGCCCCGACATGAGACCCGAGATCTGGATCGCCCAG |
| | GAGCTGAGAAGAATCGGCGACGAGTTCAACGCCTACTACGCCAGAAGAG |
| | GCAGCGGCGTGAAGCAGACCCTGAACTTCGACCTGCTGAAGCTGGCCGGC |
| | GACGTGGAGAGCAACCCCGGCCCCGAGGAGCAGTGGGCCAGAGAGATCG |
| | GCGCCCAGCTGAGAAGAATGGCCGACGACCTGAACGCCCAGTACGAGAG |
| | AAGAGGCAGCGGCGTGAAGCAGACCCTGAACTTCGACCTGCTGAAGCTG |
| | GCCGGCGACGTGGAGAGCAACCCCGGCCCCGACATGAGACCCGAGATCT |
| | GGATCGCCCAGGAGCTGAGAAGAATCGGCGACGAGTTCAACGCCTACTA |
| | CGCCAGAAGAGGCAGCGGCGTGAAGCAGACCCTGAACTTCGACCTGCTG |
| | AAGCTGGCCGGCGACGTGGAGAGCAACCCCGGCCCCGAGGAGCAGTGGG |
| | CCAGAGAGATCGGCGCCCAGCTGAGAAGAATGGCCGACGACCTGAACGC |
| | CCAGTACGAGAGAAGAGGCAGCGGCGTGAAGCAGACCCTGAACTTCGAC |
| | CTGCTGAAGCTGGCCGGCGACGTGGAGAGCAACCCCGGCCCCGACATGA |
| | GACCCGAGATCTGGATCGCCCAGGAGCTGAGAAGAATCGGCGACGAGTT |
| | CAACGCCTACTACGCCAGAAGAGGCAGCGGCGTGAAGCAGACCCTGAAC |
| | TTCGACCTGCTGAAGCTGGCCGGCGACGTGGAGAGCAACCCCGGCCCCGA |
| | GGAGCAGTGGGCCAGAGAGATCGGCGCCCAGCTGAGAAGAATGGCCGAC |
| | GACCTGAACGCCCAGTACGAGAGAAGAGGCAGCGGCGTGAAGCAGACCC |
| | TGAACTTCGACCTGCTGAAGCTGGCCGGCGACGTGGAGAGCAACCCCGGC |
| | CCCGACATGAGACCCGAGATCTGGATCGCCCAGGAGCTGAGAAGAATCG |
| | GCGACGAGTTCAACGCCTACTACGCCAGAAGAGGCAGCGGCGTGAAGCA |
| | GACCCTGAACTTCGACCTGCTGAAGCTGGCCGGCGACGTGGAGAGCAACC |
| | CCGGCCCCGAGGAGCAGTGGGCCAGAGAGATCGGCGCCCAGCTGAGAAG |
| | AATGGCCGACGACCTGAACGCCCAGTACGAGAGAAGAGGCAGCGGCGTG |
| | AAGCAGACCCTGAACTTCGACCTGCTGAAGCTGGCCGGCGACGTGGAGA |
| | GCAACCCCGGCCCCGACATGAGACCCGAGATCTGGATCGCCCAGGAGCTG |
| | AGAAGAATCGGCGACGAGTTCAACGCCTACTACGCCAGAAGAGGCAGCG |
| | GCGTGAAGCAGACCCTGAACTTCGACCTGCTGAAGCTGGCCGGCGACGTG |
| | GAGAGCAACCCCGGCCCCGAGGAGCAGTGGGCCAGAGAGATCGGCGCCC |
| | AGCTGAGAAGAATGGCCGACGACCTGAACGCCCAGTACGAGAGAAGAGG |
| | CAGCGGCGTGAAGCAGACCCTGAACTTCGACCTGCTGAAGCTGGCCGGCG |
| | ACGTGGAGAGCAACCCCGGCCCCGACATGAGACCCGAGATCTGGATCGC |
| | CCAGGAGCTGAGAAGAATCGGCGACGAGTTCAACGCCTACTACGCCAGA |
| | AGAGGCAGCGGCGTGAAGCAGACCCTGAACTTCGACCTGCTGAAGCTGG |
| | CCGGCGACGTGGAGAGCAACCCCGGCCCCGAGGAGCAGTGGGCCAGAGA |
| | GATCGGCGCCCAGCTGAGAAGAATGGCCGACGACCTGAACGCCCAGTAC |
| | GAGAGAAGAGGCAGCGGCGTGAAGCAGACCCTGAACTTCGACCTGCTGA |
| | AGCTGGCCGGCGACGTGGAGAGCAACCCCGGCCCCGACATGAGACCCGA |
| | GATCTGGATCGCCCAGGAGCTGAGAAGAATCGGCGACGAGTTCAACGCCT |
| | ACTACGCCAGAAGAGGCAGCGGCGTGAAGCAGACCCTGAACTTCGACCT |
| | GCTGAAGCTGGCCGGCGACGTGGAGAGCAACCCCGGCCCCGAGGAGCAG |
| | TGGGCCAGAGAGATCGGCGCCCAGCTGAGAAGAATGGCCGACGACCTGA |
| | ACGCCCAGTACGAGAGAAGAGGCAGCGGCGTGAAGCAGACCCTGAACTT |
| | CGACCTGCTGAAGCTGGCCGGCGACGTGGAGAGCAACCCCGGCCCCGAC |
| | ATGAGACCCGAGATCTGGATCGCCCAGGAGCTGAGAAGAATCGGCGACG |
| | AGTTCAACGCCTACTACGCCAGAAGAGGCAGCGGCGTGAAGCAGACCCT |
| | GAACTTCGACCTGCTGAAGCTGGCCGGCGACGTGGAGAGCAACCCCGGCC |
| | CCGAGGAGCAGTGGGCCAGAGAGATCGGCGCCCAGCTGAGAAGAATGGC |
| | CGACGACCTGAACGCCCAGTACGAGAGAAGAGGCAGCGGCGTGAAGCAG |
| | ACCCTGAACTTCGACCTGCTGAAGCTGGCCGGCGACGTGGAGAGCAACCC |
| | CGGCCCCGACATGAGACCCGAGATCTGGATCGCCCAGGAGCTGAGAAGA |
| | ATCGGCGACGAGTTCAACGCCTACTACGCCAGAAGAGGCAGCGGCGTGA |
| | AGCAGACCCTGAACTTCGACCTGCTGAAGCTGGCCGGCGACGTGGAGAGC |
| | AACCCCGGCCCCGGCAAGCCCATCCCCAACCCCCTGCTGGGCCTGGACAG |
| | CACC |
| | ((Puma-F2A-BimBH3-F2A)\hat{ }10_cV5) |
| 261 | ATGCAGTGGGCCAGAGAGATCGGCGCCCAGCTGAGAAGAATCGGCGACG |
| | ACCTGAACGCCCAGTACGAGAGAAGAAGACAGGGCAGCGGCGTGAAGCA |
| | GACCCTGAACTTCGACCTGCTGAAGCTGGCCGGCGACGTGGAGAGCAACC |
| | CCGGCCCCCAGTGGGCCAGAGAGATCGGCGCCCAGCTGAGAAGAATCGG |
| | CGACGACCTGAACGCCCAGTACGAGAGAAGAAGACAGGGCAGCGGCGTG |
| | AAGCAGACCCTGAACTTCGACCTGCTGAAGCTGGCCGGCGACGTGGAGA |
| | GCAACCCCGGCCCCCAGTGGGCCAGAGAGATCGGCGCCCAGCTGAGAAG |
| | AATCGGCGACGACCTGAACGCCCAGTACGAGAGAAGAAGACAGGGCAGC |
| | GGCGTGAAGCAGACCCTGAACTTCGACCTGCTGAAGCTGGCCGGCGACGT |
| | GGAGAGCAACCCCGGCCCCCAGTGGGCCAGAGAGATCGGCGCCCAGCTG |
| | AGAAGAATCGGCGACGACCTGAACGCCCAGTACGAGAGAAGAAGACAGG |
| | GCAGCGGCGTGAAGCAGACCCTGAACTTCGACCTGCTGAAGCTGGCCGGC |
| | GACGTGGAGAGCAACCCCGGCCCCCAGTGGGCCAGAGAGATCGGCGCCC |
| | AGCTGAGAAGAATCGGCGACGACCTGAACGCCCAGTACGAGAGAAGAAG |
| | ACAGGGCAGCGGCGTGAAGCAGACCCTGAACTTCGACCTGCTGAAGCTG |
| | GCCGGCGACGTGGAGAGCAACCCCGGCCCCCAGTGGGCCAGAGAGATCG |
| | GCGCCCAGCTGAGAAGAATCGGCGACGACCTGAACGCCCAGTACGAGAG |
| | AAGAAGACAGGGCAGCGGCGTGAAGCAGACCCTGAACTTCGACCTGCTG |
| | AAGCTGGCCGGCGACGTGGAGAGCAACCCCGGCCCCCAGTGGGCCAGAG |
| | AGATCGGCGCCCAGCTGAGAAGAATCGGCGACGACCTGAACGCCCAGTA |
| | CGAGAGAAGAAGACAGGGCAGCGGCGTGAAGCAGACCCTGAACTTCGAC |
| | CTGCTGAAGCTGGCCGGCGACGTGGAGAGCAACCCCGGCCCCCAGTGGG |
| | CCAGAGAGATCGGCGCCCAGCTGAGAAGAATCGGCGACGACCTGAACGC |
| | CCAGTACGAGAGAAGAAGACAGGGCAGCGGCGTGAAGCAGACCCTGAAC |
| | TTCGACCTGCTGAAGCTGGCCGGCGACGTGGAGAGCAACCCCGGCCCCCA |
| | GTGGGCCAGAGAGATCGGCGCCCAGCTGAGAAGAATCGGCGACGACCTG |
| | AACGCCCAGTACGAGAGAAGAAGACAGGGCAGCGGCGTGAAGCAGACCC |
| | TGAACTTCGACCTGCTGAAGCTGGCCGGCGACGTGGAGAGCAACCCCGGC |
| | CCCCAGTGGGCCAGAGAGATCGGCGCCCAGCTGAGAAGAATCGGCGACG |
| | ACCTGAACGCCCAGTACGAGAGAAGAAGACAGGGCAGCGGCGTGAAGCA |
| | GACCCTGAACTTCGACCTGCTGAAGCTGGCCGGCGACGTGGAGAGCAACC |
| | CCGGCCCCGGCAAGCCCATCCCCAACCCCCTGCTGGGCCTGGACAGCACC |
| | ((SuperPumaBH3.F2A)\hat{ }10_cV5, (SuperPumaBH3.F2A)\hat{ }10_cV5_DX) |
| 262 | ATGCAGTGGGCCAGAGAGATCGGCGCCCAGGAGAGAAGAGAGGCCGACG |
| | ACGAGAACGCCCAGTACGAGAGAAGAAGACAGGGCAGCGGCGTGAAGC |
| | AGACCCTGAACTTCGACCTGCTGAAGCTGGCCGGCGACGTGGAGAGCAAC |
| | CCCGGCCCCCAGTGGGCCAGAGAGATCGGCGCCCAGGAGAGAAGAGAGG |
| | CCGACGACGAGAACGCCCAGTACGAGAGAAGAAGACAGGGCAGCGGCGT |
| | GAAGCAGACCCTGAACTTCGACCTGCTGAAGCTGGCCGGCGACGTGGAG |
| | AGCAACCCCGGCCCCCAGTGGGCCAGAGAGATCGGCGCCCAGGAGAGAA |
| | GAGAGGCCGACGACGAGAACGCCCAGTACGAGAGAAGAAGACAGGGCA |
| | GCGGCGTGAAGCAGACCCTGAACTTCGACCTGCTGAAGCTGGCCGGCGAC |
| | GTGGAGAGCAACCCCGGCCCCCAGTGGGCCAGAGAGATCGGCGCCCAGG |
| | AGAGAAGAGAGGCCGACGACGAGAACGCCCAGTACGAGAGAAGAAGAC |
| | AGGGCAGCGGCGTGAAGCAGACCCTGAACTTCGACCTGCTGAAGCTGGCC |
| | GGCGACGTGGAGAGCAACCCCGGCCCCCAGTGGGCCAGAGAGATCGGCG |
| | CCCAGGAGAGAAGAGAGGCCGACGACGAGAACGCCCAGTACGAGAGAA |
| | GAAGACAGGGCAGCGGCGTGAAGCAGACCCTGAACTTCGACCTGCTGAA |
| | GCTGGCCGGCGACGTGGAGAGCAACCCCGGCCCCCAGTGGGCCAGAGAG |
| | ATCGGCGCCCAGGAGAGAAGAGAGGCCGACGACGAGAACGCCCAGTACG |
| | AGAGAAGAAGACAGGGCAGCGGCGTGAAGCAGACCCTGAACTTCGACCT |
| | GCTGAAGCTGGCCGGCGACGTGGAGAGCAACCCCGGCCCCCAGTGGGCC |
| | AGAGAGATCGGCGCCCAGGAGAGAAGAGAGGCCGACGACGAGAACGCC |
| | CAGTACGAGAGAAGAAGACAGGGCAGCGGCGTGAAGCAGACCCTGAACT |
| | TCGACCTGCTGAAGCTGGCCGGCGACGTGGAGAGCAACCCCGGCCCCCAG |
| | TGGGCCAGAGAGATCGGCGCCCAGGAGAGAAGAGAGGCCGACGACGAG |
| | AACGCCCAGTACGAGAGAAGAAGACAGGGCAGCGGCGTGAAGCAGACCC |
| | TGAACTTCGACCTGCTGAAGCTGGCCGGCGACGTGGAGAGCAACCCCGGC |
| | CCCCAGTGGGCCAGAGAGATCGGCGCCCAGGAGAGAAGAGAGGCCGACG |
| | ACGAGAACGCCCAGTACGAGAGAAGAAGACAGGGCAGCGGCGTGAAGC |
| | AGACCCTGAACTTCGACCTGCTGAAGCTGGCCGGCGACGTGGAGAGCAAC |
| | CCCGGCCCCCAGTGGGCCAGAGAGATCGGCGCCCAGGAGAGAAGAGAGG |
| | CCGACGACGAGAACGCCCAGTACGAGAGAAGAAGACAGGGCAGCGGCGT |
| | GAAGCAGACCCTGAACTTCGACCTGCTGAAGCTGGCCGGCGACGTGGAG |
| | AGCAACCCCGGCCCCCAGTGGGCCAGAGAGATCGGCGCCCAGGAGAGAA |
| | GAGAGGCCGACGACGAGAACGCCCAGTACGAGAGAAGAAGACAGGGCA |
| | GCGGCGTGAAGCAGACCCTGAACTTCGACCTGCTGAAGCTGGCCGGCGAC |
| | GTGGAGAGCAACCCCGGCCCCGGCAAGCCCATCCCCAACCCCCTGCTGGG |
| | CCTGGACAGCACC |
| | ((KittyCatBH3.F2A)\hat{ }10_cV5, (KittyCatBH3.F2A)\hat{ }10_cV5_DX) |
| 263 | ATGCAGTGGGCCAGAGAGATCGGCGCCCAGGAGAGAAGAGAGGCCGACG |
| | ACGAGAACGCCCAGTACGAGAGAAGAAGACAGGGCAGCGGCGTGAAGC |
| | AGACCCTGAACTTCGACCTGCTGAAGCTGGCCGGCGACGTGGAGAGCAAC |
| | CCCGGCCCCCAGTGGGCCAGAGAGATCGGCGCCCAGGAGAGAAGAGAGG |
| | CCGACGACGAGAACGCCCAGTACGAGAGAAGAAGACAGGGCAGCGGCGT |
| | GAAGCAGACCCTGAACTTCGACCTGCTGAAGCTGGCCGGCGACGTGGAG |
| | AGCAACCCCGGCCCCCAGTGGGCCAGAGAGATCGGCGCCCAGGAGAGAA |
| | GAGAGGCCGACGACGAGAACGCCCAGTACGAGAGAAGAAGACAGGGCA |
| | GCGGCGTGAAGCAGACCCTGAACTTCGACCTGCTGAAGCTGGCCGGCGAC |
| | GTGGAGAGCAACCCCGGCCCCCAGTGGGCCAGAGAGATCGGCGCCCAGG |
| | AGAGAAGAGAGGCCGACGACGAGAACGCCCAGTACGAGAGAAGAAGAC |
| | AGGGCAGCGGCGTGAAGCAGACCCTGAACTTCGACCTGCTGAAGCTGGCC |
| | GGCGACGTGGAGAGCAACCCCGGCCCCCAGTGGGCCAGAGAGATCGGCG |
| | CCCAGGAGAGAAGAGAGGCCGACGACGAGAACGCCCAGTACGAGAGAA |
| | GAAGACAGGGCAGCGGCGTGAAGCAGACCCTGAACTTCGACCTGCTGAA |
| | GCTGGCCGGCGACGTGGAGAGCAACCCCGGCCCCCAGTGGGCCAGAGAG |
| | ATCGGCGCCCAGGAGAGAAGAGAGGCCGACGACGAGAACGCCCAGTACG |
| | AGAGAAGAAGACAGGGCAGCGGCGTGAAGCAGACCCTGAACTTCGACCT |
| | GCTGAAGCTGGCCGGCGACGTGGAGAGCAACCCCGGCCCCCAGTGGGCC |
| | AGAGAGATCGGCGCCCAGGAGAGAAGAGAGGCCGACGACGAGAACGCC |
| | CAGTACGAGAGAAGAAGACAGGGCAGCGGCGTGAAGCAGACCCTGAACT |
| | TCGACCTGCTGAAGCTGGCCGGCGACGTGGAGAGCAACCCCGGCCCCCAG |
| | TGGGCCAGAGAGATCGGCGCCCAGGAGAGAAGAGAGGCCGACGACGAG |
| | AACGCCCAGTACGAGAGAAGAAGACAGGGCAGCGGCGTGAAGCAGACCC |
| | TGAACTTCGACCTGCTGAAGCTGGCCGGCGACGTGGAGAGCAACCCCGGC |
| | CCCCAGTGGGCCAGAGAGATCGGCGCCCAGGAGAGAAGAGAGGCCGACG |
| | ACGAGAACGCCCAGTACGAGAGAAGAAGACAGGGCAGCGGCGTGAAGC |
| | AGACCCTGAACTTCGACCTGCTGAAGCTGGCCGGCGACGTGGAGAGCAAC |
| | CCCGGCCCCCAGTGGGCCAGAGAGATCGGCGCCCAGGAGAGAAGAGAGG |
| | CCGACGACGAGAACGCCCAGTACGAGAGAAGAAGACAGGGCAGCGGCGT |
| | GAAGCAGACCCTGAACTTCGACCTGCTGAAGCTGGCCGGCGACGTGGAG |
| | AGCAACCCCGGCCCCCAGTGGGCCAGAGAGATCGGCGCCCAGGAGAGAA |
| | GAGAGGCCGACGACGAGAACGCCCAGTACGAGAGAAGAAGACAGGGCA |
| | GCGGCGTGAAGCAGACCCTGAACTTCGACCTGCTGAAGCTGGCCGGCGAC |
| | GTGGAGAGCAACCCCGGCCCCGGCAAGCCCATCCCCAACCCCCTGCTGGG |
| | CCTGGACAGCACC |
| | ((KittyCatBH3.F2A)\hat{ }10_cV5, (KittyCatBH3.F2A)\hat{ }10_cV5_DX) |
| 264 | ATGCCCGCCGAGCTGGAGGTGGAGTGCGCCACCCAGCTGAGAAGATTCG |
| | GCGACAAGCTGAACTTCAGACAGAAGCTGCTGGGCAGCGGCGTGAAGCA |
| | GACCCTGAACTTCGACCTGCTGAAGCTGGCCGGCGACGTGGAGAGCAACC |
| | CCGGCCCCCCCGCCGAGCTGGAGGTGGAGTGCGCCACCCAGCTGAGAAG |
| | ATTCGGCGACAAGCTGAACTTCAGACAGAAGCTGCTGGGCAGCGGCGTG |
| | AAGCAGACCCTGAACTTCGACCTGCTGAAGCTGGCCGGCGACGTGGAGA |
| | GCAACCCCGGCCCCCCCGCCGAGCTGGAGGTGGAGTGCGCCACCCAGCTG |
| | AGAAGATTCGGCGACAAGCTGAACTTCAGACAGAAGCTGCTGGGCAGCG |
| | GCGTGAAGCAGACCCTGAACTTCGACCTGCTGAAGCTGGCCGGCGACGTG |
| | GAGAGCAACCCCGGCCCCCCCGCCGAGCTGGAGGTGGAGTGCGCCACCC |
| | AGCTGAGAAGATTCGGCGACAAGCTGAACTTCAGACAGAAGCTGCTGGG |
| | CAGCGGCGTGAAGCAGACCCTGAACTTCGACCTGCTGAAGCTGGCCGGCG |
| | ACGTGGAGAGCAACCCCGGCCCCCCCGCCGAGCTGGAGGTGGAGTGCGC |
| | CACCCAGCTGAGAAGATTCGGCGACAAGCTGAACTTCAGACAGAAGCTG |
| | CTGGGCAGCGGCGTGAAGCAGACCCTGAACTTCGACCTGCTGAAGCTGGC |
| | CGGCGACGTGGAGAGCAACCCCGGCCCCCCCGCCGAGCTGGAGGTGGAG |
| | TGCGCCACCCAGCTGAGAAGATTCGGCGACAAGCTGAACTTCAGACAGA |
| | AGCTGCTGGGCAGCGGCGTGAAGCAGACCCTGAACTTCGACCTGCTGAAG |
| | CTGGCCGGCGACGTGGAGAGCAACCCCGGCCCCGGCAAGCCCATCCCCA |
| | ACCCCCTGCTGGGCCTGGACAGCACC |
| | ((NoxaBH3.F2A)\hat{ }5_cV5, (NoxaBH3.F2A)\hat{ }5_cV5_DX) |
| 265 | ATGCCCGCCGAGCTGGAGGTGGAGTGCGCCACCCAGCTGAGAAGATTCG |
| | GCGACAAGCTGAACTTCAGACAGAAGCTGCTGGGCAGCGGCGTGAAGCA |
| | GACCCTGAACTTCGACCTGCTGAAGCTGGCCGGCGACGTGGAGAGCAACC |
| | CCGGCCCCCCCGCCGAGCTGGAGGTGGAGTGCGCCACCCAGCTGAGAAG |
| | ATTCGGCGACAAGCTGAACTTCAGACAGAAGCTGCTGGGCAGCGGCGTG |
| | AAGCAGACCCTGAACTTCGACCTGCTGAAGCTGGCCGGCGACGTGGAGA |
| | GCAACCCCGGCCCCCCCGCCGAGCTGGAGGTGGAGTGCGCCACCCAGCTG |
| | AGAAGATTCGGCGACAAGCTGAACTTCAGACAGAAGCTGCTGGGCAGCG |
| | GCGTGAAGCAGACCCTGAACTTCGACCTGCTGAAGCTGGCCGGCGACGTG |
| | GAGAGCAACCCCGGCCCCCCCGCCGAGCTGGAGGTGGAGTGCGCCACCC |
| | AGCTGAGAAGATTCGGCGACAAGCTGAACTTCAGACAGAAGCTGCTGGG |
| | CAGCGGCGTGAAGCAGACCCTGAACTTCGACCTGCTGAAGCTGGCCGGCG |
| | ACGTGGAGAGCAACCCCGGCCCCCCCGCCGAGCTGGAGGTGGAGTGCGC |
| | CACCCAGCTGAGAAGATTCGGCGACAAGCTGAACTTCAGACAGAAGCTG |
| | CTGGGCAGCGGCGTGAAGCAGACCCTGAACTTCGACCTGCTGAAGCTGGC |
| | CGGCGACGTGGAGAGCAACCCCGGCCCCCCCGCCGAGCTGGAGGTGGAG |
| | TGCGCCACCCAGCTGAGAAGATTCGGCGACAAGCTGAACTTCAGACAGA |
| | AGCTGCTGGGCAGCGGCGTGAAGCAGACCCTGAACTTCGACCTGCTGAAG |
| | CTGGCCGGCGACGTGGAGAGCAACCCCGGCCCCCCCGCCGAGCTGGAGG |
| | TGGAGTGCGCCACCCAGCTGAGAAGATTCGGCGACAAGCTGAACTTCAGA |
| | CAGAAGCTGCTGGGCAGCGGCGTGAAGCAGACCCTGAACTTCGACCTGCT |
| | GAAGCTGGCCGGCGACGTGGAGAGCAACCCCGGCCCCCCCGCCGAGCTG |
| | GAGGTGGAGTGCGCCACCCAGCTGAGAAGATTCGGCGACAAGCTGAACT |
| | TCAGACAGAAGCTGCTGGGCAGCGGCGTGAAGCAGACCCTGAACTTCGA |
| | CCTGCTGAAGCTGGCCGGCGACGTGGAGAGCAACCCCGGCCCCCCCGCCG |
| | AGCTGGAGGTGGAGTGCGCCACCCAGCTGAGAAGATTCGGCGACAAGCT |
| | GAACTTCAGACAGAAGCTGCTGGGCAGCGGCGTGAAGCAGACCCTGAAC |
| | TTCGACCTGCTGAAGCTGGCCGGCGACGTGGAGAGCAACCCCGGCCCCCC |
| | CGCCGAGCTGGAGGTGGAGTGCGCCACCCAGCTGAGAAGATTCGGCGAC |
| | AAGCTGAACTTCAGACAGAAGCTGCTGGGCAGCGGCGTGAAGCAGACCC |
| | TGAACTTCGACCTGCTGAAGCTGGCCGGCGACGTGGAGAGCAACCCCGGC |
| | CCCCCCGCCGAGCTGGAGGTGGAGTGCGCCACCCAGCTGAGAAGATTCGG |
| | CGACAAGCTGAACTTCAGACAGAAGCTGCTGGGCAGCGGCGTGAAGCAG |
| | ACCCTGAACTTCGACCTGCTGAAGCTGGCCGGCGACGTGGAGAGCAACCC |
| | CGGCCCCGGCAAGCCCATCCCCAACCCCCTGCTGGGCCTGGACAGCACC |
| | ((NoxaBH3.F2A)\hat{ }10_cV5, (NoxaBH3.F2A)\hat{ }10_cV5_DX) |
| 266 | ATGCCCGCCGAGCTGGAGGTGGAGTGCGCCACCCAGCTGAGAAGATTCG |
| | GCGACAAGCTGAACTTCAGACAGAAGCTGCTGGGCAGCGGCGTGAAGCA |
| | GACCCTGAACTTCGACCTGCTGAAGCTGGCCGGCGACGTGGAGAGCAACC |
| | CCGGCCCCAACCTGTGGGCCGCCCAGAGATACGGCAGAGAGCTGAGAAG |
| | AATGAGCGACGAGTTCGTGGACAGCTTCAAGAAGGGCGGCAGCGGCGTG |
| | AAGCAGACCCTGAACTTCGACCTGCTGAAGCTGGCCGGCGACGTGGAGA |
| | GCAACCCCGGCCCCCCCGCCGAGCTGGAGGTGGAGTGCGCCACCCAGCTG |
| | AGAAGATTCGGCGACAAGCTGAACTTCAGACAGAAGCTGCTGGGCAGCG |
| | GCGTGAAGCAGACCCTGAACTTCGACCTGCTGAAGCTGGCCGGCGACGTG |
| | GAGAGCAACCCCGGCCCCAACCTGTGGGCCGCCCAGAGATACGGCAGAG |
| | AGCTGAGAAGAATGAGCGACGAGTTCGTGGACAGCTTCAAGAAGGGCGG |
| | CAGCGGCGTGAAGCAGACCCTGAACTTCGACCTGCTGAAGCTGGCCGGCG |
| | ACGTGGAGAGCAACCCCGGCCCCCCCGCCGAGCTGGAGGTGGAGTGCGC |
| | CACCCAGCTGAGAAGATTCGGCGACAAGCTGAACTTCAGACAGAAGCTG |
| | CTGGGCAGCGGCGTGAAGCAGACCCTGAACTTCGACCTGCTGAAGCTGGC |
| | CGGCGACGTGGAGAGCAACCCCGGCCCCAACCTGTGGGCCGCCCAGAGA |
| | TACGGCAGAGAGCTGAGAAGAATGAGCGACGAGTTCGTGGACAGCTTCA |
| | AGAAGGGCGGCAGCGGCGTGAAGCAGACCCTGAACTTCGACCTGCTGAA |
| | GCTGGCCGGCGACGTGGAGAGCAACCCCGGCCCCCCCGCCGAGCTGGAG |
| | GTGGAGTGCGCCACCCAGCTGAGAAGATTCGGCGACAAGCTGAACTTCAG |
| | ACAGAAGCTGCTGGGCAGCGGCGTGAAGCAGACCCTGAACTTCGACCTGC |
| | TGAAGCTGGCCGGCGACGTGGAGAGCAACCCCGGCCCCAACCTGTGGGC |
| | CGCCCAGAGATACGGCAGAGAGCTGAGAAGAATGAGCGACGAGTTCGTG |
| | GACAGCTTCAAGAAGGGCGGCAGCGGCGTGAAGCAGACCCTGAACTTCG |
| | ACCTGCTGAAGCTGGCCGGCGACGTGGAGAGCAACCCCGGCCCCCCCGCC |
| | GAGCTGGAGGTGGAGTGCGCCACCCAGCTGAGAAGATTCGGCGACAAGC |
| | TGAACTTCAGACAGAAGCTGCTGGGCAGCGGCGTGAAGCAGACCCTGAA |
| | CTTCGACCTGCTGAAGCTGGCCGGCGACGTGGAGAGCAACCCCGGCCCCA |
| | ACCTGTGGGCCGCCCAGAGATACGGCAGAGAGCTGAGAAGAATGAGCGA |
| | CGAGTTCGTGGACAGCTTCAAGAAGGGCGGCAGCGGCGTGAAGCAGACC |
| | CTGAACTTCGACCTGCTGAAGCTGGCCGGCGACGTGGAGAGCAACCCCGG |
| | CCCCCCCGCCGAGCTGGAGGTGGAGTGCGCCACCCAGCTGAGAAGATTCG |
| | GCGACAAGCTGAACTTCAGACAGAAGCTGCTGGGCAGCGGCGTGAAGCA |
| | GACCCTGAACTTCGACCTGCTGAAGCTGGCCGGCGACGTGGAGAGCAACC |
| | CCGGCCCCAACCTGTGGGCCGCCCAGAGATACGGCAGAGAGCTGAGAAG |
| | AATGAGCGACGAGTTCGTGGACAGCTTCAAGAAGGGCGGCAGCGGCGTG |
| | AAGCAGACCCTGAACTTCGACCTGCTGAAGCTGGCCGGCGACGTGGAGA |
| | GCAACCCCGGCCCCCCCGCCGAGCTGGAGGTGGAGTGCGCCACCCAGCTG |
| | AGAAGATTCGGCGACAAGCTGAACTTCAGACAGAAGCTGCTGGGCAGCG |
| | GCGTGAAGCAGACCCTGAACTTCGACCTGCTGAAGCTGGCCGGCGACGTG |
| | GAGAGCAACCCCGGCCCCAACCTGTGGGCCGCCCAGAGATACGGCAGAG |
| | AGCTGAGAAGAATGAGCGACGAGTTCGTGGACAGCTTCAAGAAGGGCGG |
| | CAGCGGCGTGAAGCAGACCCTGAACTTCGACCTGCTGAAGCTGGCCGGCG |
| | ACGTGGAGAGCAACCCCGGCCCCCCCGCCGAGCTGGAGGTGGAGTGCGC |
| | CACCCAGCTGAGAAGATTCGGCGACAAGCTGAACTTCAGACAGAAGCTG |
| | CTGGGCAGCGGCGTGAAGCAGACCCTGAACTTCGACCTGCTGAAGCTGGC |
| | CGGCGACGTGGAGAGCAACCCCGGCCCCAACCTGTGGGCCGCCCAGAGA |
| | TACGGCAGAGAGCTGAGAAGAATGAGCGACGAGTTCGTGGACAGCTTCA |
| | AGAAGGGCGGCAGCGGCGTGAAGCAGACCCTGAACTTCGACCTGCTGAA |
| | GCTGGCCGGCGACGTGGAGAGCAACCCCGGCCCCCCCGCCGAGCTGGAG |
| | GTGGAGTGCGCCACCCAGCTGAGAAGATTCGGCGACAAGCTGAACTTCAG |
| | ACAGAAGCTGCTGGGCAGCGGCGTGAAGCAGACCCTGAACTTCGACCTGC |
| | TGAAGCTGGCCGGCGACGTGGAGAGCAACCCCGGCCCCAACCTGTGGGC |
| | CGCCCAGAGATACGGCAGAGAGCTGAGAAGAATGAGCGACGAGTTCGTG |
| | GACAGCTTCAAGAAGGGCGGCAGCGGCGTGAAGCAGACCCTGAACTTCG |
| | ACCTGCTGAAGCTGGCCGGCGACGTGGAGAGCAACCCCGGCCCCCCCGCC |
| | GAGCTGGAGGTGGAGTGCGCCACCCAGCTGAGAAGATTCGGCGACAAGC |
| | TGAACTTCAGACAGAAGCTGCTGGGCAGCGGCGTGAAGCAGACCCTGAA |
| | CTTCGACCTGCTGAAGCTGGCCGGCGACGTGGAGAGCAACCCCGGCCCCA |
| | ACCTGTGGGCCGCCCAGAGATACGGCAGAGAGCTGAGAAGAATGAGCGA |
| | CGAGTTCGTGGACAGCTTCAAGAAGGGCGGCAGCGGCGTGAAGCAGACC |
| | CTGAACTTCGACCTGCTGAAGCTGGCCGGCGACGTGGAGAGCAACCCCGG |
| | CCCCGGCAAGCCCATCCCCAACCCCCTGCTGGGCCTGGACAGCACC |
| | ((BadBH3.F2A)\hat{ }10_cV5,(BadBH3.F2A)\hat{ }10_cV5_DX) |
| 267 | ATGCCCGCCGAGCTGGAGGTGGAGTGCGCCACCCAGCTGAGAAGATTCG |
| | GCGACAAGCTGAACTTCAGACAGAAGCTGCTGGGCAGCGGCGTGAAGCA |
| | GACCCTGAACTTCGACCTGCTGAAGCTGGCCGGCGACGTGGAGAGCAACC |
| | CCGGCCCCAACCTGTGGGCCGCCCAGAGATACGGCAGAGAGCTGAGAAG |
| | AATGAGCGACGAGTTCGTGGACAGCTTCAAGAAGGGCGGCAGCGGCGTG |
| | AAGCAGACCCTGAACTTCGACCTGCTGAAGCTGGCCGGCGACGTGGAGA |
| | GCAACCCCGGCCCCCCCGCCGAGCTGGAGGTGGAGTGCGCCACCCAGCTG |
| | AGAAGATTCGGCGACAAGCTGAACTTCAGACAGAAGCTGCTGGGCAGCG |
| | GCGTGAAGCAGACCCTGAACTTCGACCTGCTGAAGCTGGCCGGCGACGTG |
| | GAGAGCAACCCCGGCCCCAACCTGTGGGCCGCCCAGAGATACGGCAGAG |
| | AGCTGAGAAGAATGAGCGACGAGTTCGTGGACAGCTTCAAGAAGGGCGG |
| | CAGCGGCGTGAAGCAGACCCTGAACTTCGACCTGCTGAAGCTGGCCGGCG |
| | ACGTGGAGAGCAACCCCGGCCCCCCCGCCGAGCTGGAGGTGGAGTGCGC |
| | CACCCAGCTGAGAAGATTCGGCGACAAGCTGAACTTCAGACAGAAGCTG |
| | CTGGGCAGCGGCGTGAAGCAGACCCTGAACTTCGACCTGCTGAAGCTGGC |
| | CGGCGACGTGGAGAGCAACCCCGGCCCCAACCTGTGGGCCGCCCAGAGA |
| | TACGGCAGAGAGCTGAGAAGAATGAGCGACGAGTTCGTGGACAGCTTCA |
| | AGAAGGGCGGCAGCGGCGTGAAGCAGACCCTGAACTTCGACCTGCTGAA |
| | GCTGGCCGGCGACGTGGAGAGCAACCCCGGCCCCCCCGCCGAGCTGGAG |
| | GTGGAGTGCGCCACCCAGCTGAGAAGATTCGGCGACAAGCTGAACTTCAG |
| | ACAGAAGCTGCTGGGCAGCGGCGTGAAGCAGACCCTGAACTTCGACCTGC |
| | TGAAGCTGGCCGGCGACGTGGAGAGCAACCCCGGCCCCAACCTGTGGGC |
| | CGCCCAGAGATACGGCAGAGAGCTGAGAAGAATGAGCGACGAGTTCGTG |
| | GACAGCTTCAAGAAGGGCGGCAGCGGCGTGAAGCAGACCCTGAACTTCG |
| | ACCTGCTGAAGCTGGCCGGCGACGTGGAGAGCAACCCCGGCCCCCCCGCC |
| | GAGCTGGAGGTGGAGTGCGCCACCCAGCTGAGAAGATTCGGCGACAAGC |
| | TGAACTTCAGACAGAAGCTGCTGGGCAGCGGCGTGAAGCAGACCCTGAA |
| | CTTCGACCTGCTGAAGCTGGCCGGCGACGTGGAGAGCAACCCCGGCCCCA |
| | ACCTGTGGGCCGCCCAGAGATACGGCAGAGAGCTGAGAAGAATGAGCGA |
| | CGAGTTCGTGGACAGCTTCAAGAAGGGCGGCAGCGGCGTGAAGCAGACC |
| | CTGAACTTCGACCTGCTGAAGCTGGCCGGCGACGTGGAGAGCAACCCCGG |
| | CCCCGGCAAGCCCATCCCCAACCCCCTGCTGGGCCTGGACAGCACC |
| | ((Noxa-F2A-BadBH3-F2A)\hat{ }5_cV5, (Noxa-F2A-BadBH3-F2A)\hat{ }5_cV5_DX) |
| 268 | ATGCCCGCCGAGCTGGAGGTGGAGTGCGCCACCCAGCTGAGAAGATTCG |
| | GCGACAAGCTGAACTTCAGACAGAAGCTGCTGGGCAGCGGCGTGAAGCA |
| | GACCCTGAACTTCGACCTGCTGAAGCTGGCCGGCGACGTGGAGAGCAACC |
| | CCGGCCCCAACCTGTGGGCCGCCCAGAGATACGGCAGAGAGCTGAGAAG |
| | AATGAGCGACGAGTTCGTGGACAGCTTCAAGAAGGGCGGCAGCGGCGTG |
| | AAGCAGACCCTGAACTTCGACCTGCTGAAGCTGGCCGGCGACGTGGAGA |
| | GCAACCCCGGCCCCCCCGCCGAGCTGGAGGTGGAGTGCGCCACCCAGCTG |
| | AGAAGATTCGGCGACAAGCTGAACTTCAGACAGAAGCTGCTGGGCAGCG |
| | GCGTGAAGCAGACCCTGAACTTCGACCTGCTGAAGCTGGCCGGCGACGTG |
| | GAGAGCAACCCCGGCCCCAACCTGTGGGCCGCCCAGAGATACGGCAGAG |
| | AGCTGAGAAGAATGAGCGACGAGTTCGTGGACAGCTTCAAGAAGGGCGG |
| | CAGCGGCGTGAAGCAGACCCTGAACTTCGACCTGCTGAAGCTGGCCGGCG |
| | ACGTGGAGAGCAACCCCGGCCCCCCCGCCGAGCTGGAGGTGGAGTGCGC |
| | CACCCAGCTGAGAAGATTCGGCGACAAGCTGAACTTCAGACAGAAGCTG |
| | CTGGGCAGCGGCGTGAAGCAGACCCTGAACTTCGACCTGCTGAAGCTGGC |
| | CGGCGACGTGGAGAGCAACCCCGGCCCCAACCTGTGGGCCGCCCAGAGA |
| | TACGGCAGAGAGCTGAGAAGAATGAGCGACGAGTTCGTGGACAGCTTCA |
| | AGAAGGGCGGCAGCGGCGTGAAGCAGACCCTGAACTTCGACCTGCTGAA |
| | GCTGGCCGGCGACGTGGAGAGCAACCCCGGCCCCCCCGCCGAGCTGGAG |
| | GTGGAGTGCGCCACCCAGCTGAGAAGATTCGGCGACAAGCTGAACTTCAG |
| | ACAGAAGCTGCTGGGCAGCGGCGTGAAGCAGACCCTGAACTTCGACCTGC |
| | TGAAGCTGGCCGGCGACGTGGAGAGCAACCCCGGCCCCAACCTGTGGGC |
| | CGCCCAGAGATACGGCAGAGAGCTGAGAAGAATGAGCGACGAGTTCGTG |
| | GACAGCTTCAAGAAGGGCGGCAGCGGCGTGAAGCAGACCCTGAACTTCG |
| | ACCTGCTGAAGCTGGCCGGCGACGTGGAGAGCAACCCCGGCCCCCCCGCC |
| | GAGCTGGAGGTGGAGTGCGCCACCCAGCTGAGAAGATTCGGCGACAAGC |
| | TGAACTTCAGACAGAAGCTGCTGGGCAGCGGCGTGAAGCAGACCCTGAA |
| | CTTCGACCTGCTGAAGCTGGCCGGCGACGTGGAGAGCAACCCCGGCCCCA |
| | ACCTGTGGGCCGCCCAGAGATACGGCAGAGAGCTGAGAAGAATGAGCGA |
| | CGAGTTCGTGGACAGCTTCAAGAAGGGCGGCAGCGGCGTGAAGCAGACC |
| | CTGAACTTCGACCTGCTGAAGCTGGCCGGCGACGTGGAGAGCAACCCCGG |
| | CCCCCCCGCCGAGCTGGAGGTGGAGTGCGCCACCCAGCTGAGAAGATTCG |
| | GCGACAAGCTGAACTTCAGACAGAAGCTGCTGGGCAGCGGCGTGAAGCA |
| | GACCCTGAACTTCGACCTGCTGAAGCTGGCCGGCGACGTGGAGAGCAACC |
| | CCGGCCCCAACCTGTGGGCCGCCCAGAGATACGGCAGAGAGCTGAGAAG |
| | AATGAGCGACGAGTTCGTGGACAGCTTCAAGAAGGGCGGCAGCGGCGTG |
| | AAGCAGACCCTGAACTTCGACCTGCTGAAGCTGGCCGGCGACGTGGAGA |
| | GCAACCCCGGCCCCCCCGCCGAGCTGGAGGTGGAGTGCGCCACCCAGCTG |
| | AGAAGATTCGGCGACAAGCTGAACTTCAGACAGAAGCTGCTGGGCAGCG |
| | GCGTGAAGCAGACCCTGAACTTCGACCTGCTGAAGCTGGCCGGCGACGTG |
| | GAGAGCAACCCCGGCCCCAACCTGTGGGCCGCCCAGAGATACGGCAGAG |
| | AGCTGAGAAGAATGAGCGACGAGTTCGTGGACAGCTTCAAGAAGGGCGG |
| | CAGCGGCGTGAAGCAGACCCTGAACTTCGACCTGCTGAAGCTGGCCGGCG |
| | ACGTGGAGAGCAACCCCGGCCCCCCCGCCGAGCTGGAGGTGGAGTGCGC |
| | CACCCAGCTGAGAAGATTCGGCGACAAGCTGAACTTCAGACAGAAGCTG |
| | CTGGGCAGCGGCGTGAAGCAGACCCTGAACTTCGACCTGCTGAAGCTGGC |
| | CGGCGACGTGGAGAGCAACCCCGGCCCCAACCTGTGGGCCGCCCAGAGA |
| | TACGGCAGAGAGCTGAGAAGAATGAGCGACGAGTTCGTGGACAGCTTCA |
| | AGAAGGGCGGCAGCGGCGTGAAGCAGACCCTGAACTTCGACCTGCTGAA |
| | GCTGGCCGGCGACGTGGAGAGCAACCCCGGCCCCCCCGCCGAGCTGGAG |
| | GTGGAGTGCGCCACCCAGCTGAGAAGATTCGGCGACAAGCTGAACTTCAG |
| | ACAGAAGCTGCTGGGCAGCGGCGTGAAGCAGACCCTGAACTTCGACCTGC |
| | TGAAGCTGGCCGGCGACGTGGAGAGCAACCCCGGCCCCAACCTGTGGGC |
| | CGCCCAGAGATACGGCAGAGAGCTGAGAAGAATGAGCGACGAGTTCGTG |
| | GACAGCTTCAAGAAGGGCGGCAGCGGCGTGAAGCAGACCCTGAACTTCG |
| | ACCTGCTGAAGCTGGCCGGCGACGTGGAGAGCAACCCCGGCCCCCCCGCC |
| | GAGCTGGAGGTGGAGTGCGCCACCCAGCTGAGAAGATTCGGCGACAAGC |
| | TGAACTTCAGACAGAAGCTGCTGGGCAGCGGCGTGAAGCAGACCCTGAA |
| | CTTCGACCTGCTGAAGCTGGCCGGCGACGTGGAGAGCAACCCCGGCCCCA |
| | ACCTGTGGGCCGCCCAGAGATACGGCAGAGAGCTGAGAAGAATGAGCGA |
| | CGAGTTCGTGGACAGCTTCAAGAAGGGCGGCAGCGGCGTGAAGCAGACC |
| | CTGAACTTCGACCTGCTGAAGCTGGCCGGCGACGTGGAGAGCAACCCCGG |
| | CCCCGGCAAGCCCATCCCCAACCCCCTGCTGGGCCTGGACAGCACC |
| | ((Noxa-F2A-BadBH3-F2A)\hat{ }10_cV5) |
| 269 | ATGGAGGAGCAGTGGGCTAGAGAAATTGGCGCGCAACTGAGACGCATGG |
| | CCGACGACCTTAACGCTCAATACGAAAGAAGGGGGTCGGGCGTGAAACA |
| | GACCTTGAATTTCGATCTGCTCAAACTGGCTGGTGATGTGGAGAGCAACC |
| | CGGGGCCTGACATGAGACCCGAAATATGGATTGCTCAGGAACTGCGGAG |
| | AATCGGAGACGAATTCAATGCGTATTATGCCAGACGCGGGAGCGGAGTG |
| | AAACAGACCCTTAACTTTGACCTCCTCAAGCTCGCAGGGGATGTGGAAAG |
| | CAATCCTGGTCCCGAAGAGCAATGGGCCAGAGAAATCGGCGCCCAACTG |
| | CGACGCATGGCCGATGATCTGAATGCCCAGTACGAACGTAGGGGTTCCGG |
| | TGTGAAGCAAACCCTCAACTTTGATTTATTAAAACTCGCCGGTGACGTCG |
| | AGAGCAATCCCGGCCCGGATATGCGCCCAGAAATTTGGATAGCCCAAGA |
| | GCTGAGAAGAATAGGCGACGAGTTTAACGCCTACTATGCCAGACGGGGC |
| | AGCGGCGTGAAACAAACTCTGAATTTCGACCTGCTGAAGCTAGCAGGCGA |
| | TGTGGAAAGCAATCCCGGGCCGGAAGAACAATGGGCCAGAGAAATCGGA |
| | GCCCAGCTGCGTAGAATGGCAGACGATTTAAACGCCCAGTATGAGAGGA |
| | GGGGCAGTGGCGTTAAACAGACCCTGAATTTTGATCTGCTGAAACTTGCC |
| | GGCGATGTGGAATCGAACCCCGGCCCCGATATGAGACCAGAGATCTGGAT |
| | CGCCCAGGAACTGAGGCGTATCGGTGATGAATTTAATGCCTACTATGCCA |
| | GGAGAGGCTCTGGTGTTAAGCAGACCCTGAATTTCGATCTGTTAAAGCTG |
| | GCCGGCGATGTGGAGTCCAACCCCGGGCCTGGAAAACCTATCCCCAACCC |
| | CCTACTGGGACTCGACAGCACC |
| | ((Puma-F2A-BimBH3-F2A)\hat{ }3_cV5_DX) |
| 270 | ATGCAATGGGCCAGAGAGATCGGAGCACAACTGCGGAGAATTGGAGAT |
| | GACCTGAACGCACAGTACGAACGCCGCAGACAGGGATCGGGCGTGAAG |
| | CAAACCCTCAATTTCGATCTTCTGAAATTGGCGGGCGACGTCGAGTCGA |
| | ACCCTGGTCCACAATGGGCGCGGGAAATCGGTGCCCAGCTGAGGAGAAT |
| | TGGCGATGACCTCAACGCCCAGTACGAAAGGCGGCGGCAGGGCAGCGG |
| | AGTGAAGCAGACTCTTAACTTCGACTTGCTGAAGCTGGCTGGGGACGTG |
| | GAATCCAACCCTGGACCCCAGTGGGCCCGCGAAATCGGCGCCCAGCTGC |
| | GGCGCATCGGGGACGACCTCAATGCGCAGTACGAGCGGCGGCGCCAGG |
| | GGTCCGGCGTCAAGCAGACCCTGAACTTCGACCTCCTCAAGCTGGCCGG |
| | AGATGTGGAGTCCAACCCGGGTCCCGGATCAGGGGTCAAGCAAACTCTG |
| | AACTTTGATCTGCTGAAGCTCGCTGGCGACGTGGAGAGCAACCCGGGAC |
| | CGGGAAAGCCTATTCCGAACCCCCTGCTGGGCCTGGACTCCACC |
| | ((SuperPumaBH3.F2A)\hat{ }3_cV5_DNA2.0) |
| 271 | ATGGAAGAACAATGGGCTAGGGAAATCGGAGCACAACTGAGAAGAATG |
| | GCAGACGATCTGAACGCCCAGTACGAGCGCCGGGGCTCAGGGGTCAAA |
| | CAGACCCTTAACTTCGATTTGCTGAAGCTCGCCGGGGATGTGGAGTCAA |
| | ATCCGGGGCCTGATATGCGGCCTGAAATTTGGATCGCACAGGAACTCCG |
| | CCGCATTGGGGATGAATTCAATGCGTACTATGCCAGGAGGGGAAGCGGC |
| | GTGAAGCAGACCCTGAACTTTGACTTGCTGAAACTGGCCGGTGACGTCG |
| | AGTCTAACCCTGGACCTGAGGAACAGTGGGCCAGGGAAATTGGAGCCCA |
| | GCTGCGGCGGATGGCCGATGACCTCAACGCCCAATACGAGCGCAGAGGC |
| | AGCGGGGTCAAGCAGACTCTCAATTTTGATCTCCTCAAGCTGGCCGGCG |
| | ATGTCGAGTCCAATCCGGGACCGGACATGAGGCCGGAGATTTGGATTGC |
| | CCAAGAGCTGCGCCGGATCGGGGACGAATTCAACGCCTACTACGCGCGG |
| | CGGGGTTCCGGAGTGAAGCAAACTTTGAATTTCGACCTTCTGAAATTGG |
| | CCGGCGACGTGGAGTCGAACCCGGGTCCGGAGGAGCAGTGGGCCCGCG |
| | AGATCGGCGCGCAGCTCAGACGCATGGCCGACGACCTGAACGCACAGTA |
| | CGAACGCAGGGGCTCGGGAGTTAAGCAGACCTTGAACTTCGATCTCCTG |
| | AAGCTTGCTGGAGATGTGGAATCCAACCCTGGTCCGGACATGCGGCCAG |
| | AAATCTGGATCGCCCAGGAACTGCGGCGCATCGGCGACGAGTTCAACGC |
| | TTACTACGCCCGCCGGGGTTCGGGCGTGAAACAAACCCTGAATTTCGAT |
| | CTTCTGAAGCTGGCGGGGGACGTGGAGAGCAACCCCGGACCCGGAAAG |
| | CCCATCCCAAACCCCCTGCTGGGTCTGGACTCCACC |
| | ((Puma-F2A-BimBH3-F2A)\hat{ }3_cV5_DX_DNA2.0) |
| 272 | ATGCAATGGGCCAGAGAAATTGGAGCGCAACTCAGAAGAATCGGCGAC |
| | GATCTGAACGCTCAGTACGAAAGACGCCGCCAGGGATCCGGCGTGAAGC |
| | AAACTCTGAACTTTGACCTCCTTAAGCTCGCCGGGGATGTCGAGAGCAA |
| | TCCTGGACCGCAGTGGGCCAGGGAGATCGGTGCCCAGTTGCGGCGGATC |
| | GGCGATGATCTCAACGCCCAATATGAACGGCGGAGACAGGGAAGCGGA |
| | GTCAAGCAAACCTTGAACTTCGACCTCCTGAAGCTGGCTGGCGACGTCG |
| | AATCCAACCCTGGACCCCAGTGGGCGCGGGAAATTGGTGCCCAGCTGCG |
| | ACGGATCGGGGATGACCTCAACGCACAATACGAGAGGCGGAGGCAGGG |
| | TTCCGGCGTCAAGCAGACTCTTAATTTCGATCTCCTGAAATTGGCCGGCG |
| | ATGTGGAGTCAAACCCGGGCCCGCAATGGGCCCGCGAGATCGGCGCCCA |
| | ACTGCGGCGCATTGGCGACGACCTGAACGCCCAGTACGAGCGCAGACGC |
| | CAGGGGTCCGGAGTGAAGCAGACCCTCAACTTCGATTTGTTGAAGCTCG |
| | CGGGCGACGTGGAAAGCAATCCGGGACCACAGTGGGCTAGAGAGATCG |
| | GAGCCCAGCTGAGGCGCATTGGTGACGACCTCAATGCACAGTACGAACG |
| | GAGGCGGCAGGGTTCGGGGGTGAAACAGACCCTGAACTTCGATCTGCTC |
| | AAGCTGGCGGGAGATGTGGAATCGAACCCAGGGCCGGGAAAGCCTATT |
| | CCCAACCCTCTGCTGGGCCTGGATTCCACC |
| | ((SuperPumaBH3.F2A)\hat{ }5_cV5_DNA2.0) |
| 273 | ATGGAAGAACAATGGGCACGGGAAATTGGAGCGCAGCTGAGGAGAATG |
| | GCTGATGACCTGAACGCTCAATACGAACGCCGCGGATCCGGCGTGAAGC |
| | AGACTCTTAACTTCGACTTGCTCAAGCTCGCTGGCGATGTCGAGTCCAAC |
| | CCGGGCCCCGAGGAGCAATGGGCCCGCGAAATTGGGGCCCAGCTCCGGC |
| | GCATGGCGGACGATCTCAACGCGCAGTATGAACGGAGGGGCTCCGGAGT |
| | CAAGCAGACCCTCAACTTCGACCTCCTGAAGCTCGCCGGCGACGTGGAG |
| | AGCAACCCTGGTCCCGAAGAACAGTGGGCCAGAGAAATCGGTGCCCAG |
| | CTTCGCCGGATGGCCGACGACTTGAACGCCCAATACGAGCGGAGAGGCT |
| | CGGGAGTGAAGCAAACCCTGAACTTCGATCTGCTTAAGCTGGCTGGGGA |
| | CGTCGAATCCAACCCCGGACCTGAGGAGCAGTGGGCCCGGGAAATCGG |
| | GGCCCAACTGAGAAGGATGGCAGACGACCTGAATGCCCAGTACGAGCG |
| | CCGCGGCTCAGGAGTGAAACAGACCTTGAACTTTGACTTGCTGAAGCTG |
| | GCCGGGGACGTGGAAAGCAACCCGGGGCCAGAGGAACAGTGGGCGCGG |
| | GAGATCGGTGCTCAGCTGAGAAGAATGGCAGATGATCTGAATGCGCAGT |
| | ACGAACGGCGCGGATCTGGAGTCAAACAGACCCTGAATTTCGACCTGTT |
| | GAAACTGGCCGGAGATGTGGAATCAAACCCCGGCCCTGGAAAGCCGATC |
| | CCGAACCCACTGCTGGGGCTCGACTCCACC |
| | ((pumaBH3.F2A)\hat{ }5_cV5_DNA2.0) |
| 274 | ATGCAATGGGCACGAGAGATTGGAGCACAGGAACGGAGAGAAGCCGAT |
| | GACGAGAACGCGCAGTACGAACGGCGGCGCCAGGGTTCCGGCGTGAAA |
| | CAGACTCTCAACTTCGACTTGCTGAAGCTCGCCGGGGACGTGGAATCCA |
| | ATCCAGGACCTCAATGGGCCCGGGAAATCGGCGCGCAGGAAAGACGCG |
| | AAGCCGACGATGAAAACGCCCAATACGAGCGGCGCAGACAGGGGTCGG |
| | GCGTGAAGCAAACGCTGAATTTCGACCTCCTGAAGTTGGCCGGAGATGT |
| | CGAGTCCAACCCTGGACCCCAGTGGGCCAGAGAGATTGGTGCCCAAGAA |
| | AGGAGAGAAGCGGATGACGAAAACGCTCAGTACGAGAGGCGCAGACAA |
| | GGCTCGGGAGTCAAGCAGACTCTGAACTTCGATCTTCTGAAGCTGGCTG |
| | GCGATGTGGAAAGCAACCCAGGACCGCAGTGGGCGCGCGAGATCGGAG |
| | CCCAGGAGAGGAGGGAGGCCGACGACGAAAATGCACAGTACGAAAGAA |
| | GGCGCCAGGGCTCCGGAGTGAAGCAGACCCTCAACTTTGACTTGCTCAA |
| | GCTGGCCGGCGACGTGGAGAGCAACCCTGGCCCGCAATGGGCTAGAGA |
| | AATCGGAGCTCAGGAGCGGCGGGAAGCAGACGACGAGAATGCGCAGTA |
| | TGAGCGCCGGCGGCAGGGAAGCGGTGTCAAGCAAACCCTGAACTTTGAT |
| | CTGCTCAAACTGGCCGGGGATGTGGAATCGAACCCCGGACCGGGGAAGC |
| | CCATCCCCAACCCGCTTCTGGGCCTGGACTCCACC |
| | ((KittyCatBH3.F2A)\hat{ }5_cV5_DNA2.0) |
| 275 | ATGCAGTGGGCTAGGGAAATCGGTGCACAAGAGAGAAGGGAAGCGGACG |
| | ACGAGAACGCACAGTACGAGCGCCGCCGGCAGGGGAGCGGAGTCAAACA |
| | GACCCTTAACTTTGATCTGCTGAAACTCGCCGGCGACGTGGAATCCAACC |
| | CGGGTCCGCAGTGGGCGCGCGAAATTGGGGCGCAGGAGCGCCGCGAAGC |
| | GGATGACGAAAACGCTCAGTACGAACGTCGGCGGCAGGGAAGCGGCGTG |
| | AAGCAGACGCTGAATTTTGACCTTTTGAAACTGGCCGGAGATGTGGAGAG |
| | CAACCCTGGACCGCAATGGGCCAGAGAGATTGGGGCCCAAGAACGGCGA |
| | GAAGCCGACGACGAGAACGCCCAGTACGAACGCCGGCGCCAGGGCTCTG |
| | GAGTGAAACAGACCTTGAACTTCGACCTCTTGAAATTGGCCGGAGATGTC |
| | GAATCAAACCCTGGTCCTCAGTGGGCCCGGGAGATTGGCGCACAAGAGC |
| | GCAGAGAAGCTGACGATGAAAATGCGCAATACGAAAGACGGCGCCAAGG |
| | TTCTGGCGTGAAACAAACTCTCAACTTCGACTTGCTGAAGCTTGCGGGGG |
| | ATGTGGAATCAAACCCGGGACCCCAGTGGGCGAGGGAAATAGGGGCACA |
| | GGAAAGAAGAGAAGCAGATGATGAAAACGCCCAATATGAGCGCCGGCGG |
| | CAAGGGTCCGGAGTGAAGCAAACTTTGAATTTCGATCTCCTCAAGCTGGC |
| | GGGGGACGTCGAGTCTAATCCTGGGCCACAATGGGCCCGCGAAATTGGA |
| | GCACAGGAACGCCGCGAGGCCGACGACGAGAACGCCCAATATGAAAGAA |
| | GGCGCCAGGGATCCGGAGTCAAGCAAACACTGAACTTTGACCTCTTGAAG |
| | CTCGCTGGCGATGTCGAGTCCAATCCCGGCCCACAGTGGGCGCGCGAGAT |
| | TGGAGCTCAAGAGCGGCGGGAAGCAGACGACGAAAACGCGCAGTATGAA |
| | CGCCGGAGACAGGGCTCGGGGGTCAAGCAGACCCTGAACTTCGATCTGCT |
| | AAAGCTGGCCGGTGACGTCGAGTCTAACCCCGGTCCTCAATGGGCACGGG |
| | AAATCGGGGCGCAAGAGCGGCGCGAGGCAGACGACGAGAACGCGCAATA |
| | TGAACGCAGACGGCAGGGGTCCGGCGTCAAGCAGACTTTAAATTTCGACC |
| | TCCTCAAGTTGGCAGGGGATGTGGAATCGAACCCCGGACCACAGTGGGCC |
| | AGGGAGATCGGAGCCCAGGAACGGAGAGAAGCCGATGACGAGAATGCCC |
| | AGTACGAAAGGCGCCGCCAGGGGTCGGGGGTGAAACAGACTTTGAACTT |
| | CGACCTTCTGAAACTGGCTGGGGACGTTGAGAGCAATCCGGGACCTCAGT |
| | GGGCCCGAGAGATCGGCGCCCAGGAAAGAAGAGAGGCTGATGACGAAAA |
| | TGCCCAATACGAGCGTCGCAGACAGGGTTCGGGTGTGAAGCAGACTCTGA |
| | ACTTCGATCTGCTCAAGCTCGCCGGGGACGTGGAGTCGAACCCGGGGCCC |
| | CAATGGGCGAGAGAAATTGGTGCCCAGGAGCGAAGAGAGGCCGATGATG |
| | AGAACGCTCAATACGAACGCAGGCGACAGGGCTCCGGTGTCAAGCAAAC |
| | CCTCAACTTCGATTTGCTCAAGCTTGCCGGGGATGTCGAAAGCAACCCGG |
| | GCCCGGGGAAGCCGATCCCGAACCCCCTGCTGGGTCTGGATTCCACT |
| | (KittyCatBH3.F2A)\hat{ }10_cV5_DNA2.0) |
| 276 | ATGGAAGAACAATGGGCAAGGGAAATCGGGGCCCAGTTGCGAAGAATGG |
| | CTGACGACCTCAATGCTCAATACGAACGCAGGGGATCTGGAGTCAAACAA |
| | ACCCTGAACTTCGACCTCCTGAAACTCGCGGGGGATGTGGAATCGAACCC |
| | AGGTCCAGAGGAGCAATGGGCCCGCGAAATCGGTGCGCAGCTGCGTCGC |
| | ATGGCAGATGACCTTAACGCACAATACGAACGGCGCGGATCCGGGGTTA |
| | AGCAAACTCTGAATTTCGATCTCTTGAAATTGGCGGGAGATGTGGAAAGC |
| | AACCCTGGACCCGAGGAGCAGTGGGCTCGGGAAATCGGAGCGCAGTTAC |
| | GGCGCATGGCGGACGACCTGAACGCGCAATACGAAAGACGCGGGTCGGG |
| | AGTCAAGCAGACCTTGAACTTTGACTTGCTGAAGCTCGCGGGCGATGTGG |
| | AGTCCAACCCGGGTCCGGAGGAGCAATGGGCACGGGAGATTGGAGCCCA |
| | ACTGCGACGCATGGCCGACGATCTGAACGCCCAATACGAGCGGCGGGGC |
| | TCCGGTGTCAAGCAAACCCTCAACTTCGATTTGCTCAAACTGGCCGGGGA |
| | TGTCGAGTCGAACCCCGGACCGGAAGAACAGTGGGCGAGAGAGATTGGT |
| | GCACAGCTCAGAAGAATGGCCGATGATCTCAACGCGCAGTACGAACGGA |
| | GAGGTTCCGGCGTGAAGCAGACCCTCAATTTTGACCTCCTGAAGCTTGCC |
| | GGCGATGTCGAGAGCAACCCCGGCCCCGAGGAACAGTGGGCCCGGGAAA |
| | TTGGGGCACAGCTGCGCCGGATGGCGGACGATCTCAATGCGCAGTACGAG |
| | CGGAGAGGATCAGGGGTGAAGCAAACTCTCAACTTTGATCTGCTGAAGCT |
| | GGCCGGTGACGTGGAGTCTAACCCAGGGCCCGAGGAACAGTGGGCCCGG |
| | GAGATCGGCGCCCAGCTGAGGCGGATGGCCGATGACTTGAACGCCCAGT |
| | ACGAAAGGCGGGGATCCGGAGTAAAGCAGACTTTGAATTTCGACCTTCTT |
| | AAGTTGGCCGGGGACGTGGAATCAAACCCAGGACCGGAGGAACAGTGGG |
| | CCAGGGAGATCGGTGCCCAGCTCAGGAGGATGGCTGACGACCTCAACGC |
| | GCAGTATGAAAGAAGAGGGTCCGGAGTGAAGCAGACTCTTAACTTCGATC |
| | TCCTGAAGCTGGCTGGTGATGTGGAGAGCAATCCGGGGCCCGAAGAACA |
| | ATGGGCCAGAGAAATTGGCGCGCAGTTGCGGCGGATGGCTGATGACCTG |
| | AACGCACAGTACGAGAGGCGGGGCAGCGGAGTGAAACAGACCCTGAATT |
| | TTGATCTTCTGAAGTTGGCGGGCGACGTGGAATCCAACCCCGGGCCGGAA |
| | GAACAGTGGGCACGCGAGATTGGCGCTCAGCTGCGCAGAATGGCAGACG |
| | ACTTGAACGCTCAGTACGAACGCCGGGGCTCGGGGGTGAAGCAGACGCT |
| | GAACTTTGATCTCCTCAAACTCGCCGGCGACGTCGAAAGCAATCCTGGCC |
| | CCGGAAAGCCCATCCCCAACCCCCTGCTGGGTCTGGACTCCACC |
| | ((pumaBH3.F2A)\hat{ }10_cV5_DNA2.0) |
| 277 | ATGGAAGAACAATGGGCGCGGGAAATCGGGGCGCAACTGAGAAGAATGG |
| | CAGATGATCTCAATGCCCAGTATGAACGCCGGGGTAGCGGGGTCAAGCA |
| | GACTTTGAATTTCGATCTCCTTAAGCTCGCTGGAGATGTGGAGTCCAACCC |
| | TGGACCCGATATGAGGCCTGAAATCTGGATCGCGCAGGAACTGAGGCGC |
| | ATCGGCGATGAATTCAATGCATACTACGCCCGCCGGGGCTCTGGCGTTAA |
| | GCAAACACTGAACTTCGACCTCCTGAAGCTGGCCGGGGATGTGGAAAGTA |
| | ATCCGGGTCCCGAAGAACAATGGGCACGGGAAATTGGAGCCCAGCTCCG |
| | CCGGATGGCAGACGATCTGAACGCACAATACGAGAGGCGGGGGTCGGGA |
| | GTGAAGCAAACCCTGAACTTTGACTTGCTTAAGCTGGCTGGGGACGTGGA |
| | GAGCAATCCTGGACCAGACATGCGCCCAGAGATTTGGATTGCTCAGGAAC |
| | TGCGGAGAATCGGGGATGAGTTCAATGCGTATTACGCCCGGCGGGGCTCC |
| | GGCGTGAAGCAGACTCTGAACTTCGACCTTCTGAAGTTGGCTGGCGATGT |
| | GGAATCAAACCCCGGCCCGGAGGAACAGTGGGCGAGGGAAATCGGCGCT |
| | CAGCTTAGACGGATGGCCGACGACCTCAACGCGCAATACGAGCGCCGGG |
| | GCTCAGGCGTGAAGCAGACGCTCAACTTTGACCTCTTGAAACTGGCGGGG |
| | GACGTGGAGTCGAACCCGGGACCTGATATGCGGCCGGAGATCTGGATTGC |
| | GCAGGAGCTGCGCCGCATCGGAGATGAATTCAACGCCTATTACGCGCGCA |
| | GAGGATCCGGCGTCAAACAGACTCTCAATTTCGACCTCCTGAAGCTGGCC |
| | GGTGACGTGGAATCCAATCCCGGCCCTGAAGAACAGTGGGCCAGAGAGA |
| | TCGGTGCTCAGCTTCGCCGCATGGCCGATGACCTGAACGCTCAGTACGAA |
| | CGGCGGGGATCCGGAGTAAAACAGACCCTGAATTTTGATCTGCTGAAGCT |
| | CGCTGGCGACGTCGAATCGAACCCTGGCCCGGATATGCGCCCTGAAATCT |
| | GGATCGCTCAGGAGCTCCGCCGCATTGGCGACGAATTTAACGCCTACTAT |
| | GCCCGGCGCGGATCGGGGGTGAAACAGACTCTTAATTTCGACTTGCTCAA |
| | ACTTGCGGGAGATGTCGAATCTAACCCCGGACCAGAGGAGCAATGGGCC |
| | CGCGAGATCGGAGCACAGCTGCGGAGGATGGCTGACGACTTGAACGCGC |
| | AGTATGAGCGCCGCGGTTCGGGGGTCAAACAAACTCTAAACTTCGACTTA |
| | CTGAAGCTTGCCGGCGACGTGGAAAGCAACCCTGGTCCCGACATGCGGCC |
| | CGAAATTTGGATCGCCCAGGAGCTGAGGAGAATCGGCGACGAGTTCAAC |
| | GCGTACTACGCCAGACGCGGCTCCGGAGTCAAGCAAACTCTTAACTTCGA |
| | TCTGTTGAAACTCGCGGGTGATGTCGAGAGCAACCCGGGCCCTGGAAAGC |
| | CGATCCCTAACCCGCTGCTCGGCCTGGACTCCACT |
| | ((Puma-F2A-BimBH3-F2A)\hat{ }5_cV5_DNA2.0) |
| 278 | ATGCAATGGGCACGAGAGATTGGTGCTCAACTCAGACGGATTGGTGACGA |
| | CCTCAACGCCCAGTACGAGCGGAGGCGGCAAGGCTCCGGTGTGAAGCAA |
| | ACCCTGAACTTCGATTTGCTCAAGCTGGCTGGAGATGTCGAGAGCAACCC |
| | CGGGCCTCAATGGGCGAGGGAGATCGGAGCCCAGCTTAGAAGGATAGGC |
| | GACGATCTGAATGCACAGTATGAAAGACGGCGGCAGGGATCCGGAGTCA |
| | AACAGACTCTGAACTTTGACCTCCTGAAGCTGGCCGGAGATGTGGAAAGC |
| | AACCCGGGTCCTCAGTGGGCACGCGAAATCGGAGCTCAGCTGCGCAGGAT |
| | TGGTGATGATCTGAACGCACAGTACGAACGACGCCGCCAGGGGAGCGGA |
| | GTCAAGCAAACCTTGAACTTTGATCTGCTGAAGCTTGCCGGCGATGTGGA |
| | ATCCAACCCTGGACCCCAGTGGGCTCGCGAAATTGGCGCCCAGCTGAGGA |
| | GGATCGGCGACGACTTGAACGCCCAATATGAACGCCGGAGGCAGGGCTC |
| | CGGAGTGAAACAAACCCTCAACTTTGATTTGCTTAAGTTGGCCGGGGACG |
| | TGGAGTCTAACCCGGGCCCCCAGTGGGCCAGAGAGATCGGCGCGCAACTC |
| | AGAAGGATTGGCGACGACCTGAACGCGCAGTATGAGAGGCGGAGACAGG |
| | GCAGCGGCGTGAAGCAGACCTTAAACTTCGACCTGTTGAAGTTGGCTGGC |
| | GATGTCGAATCGAACCCTGGCCCACAATGGGCCCGGGAGATTGGAGCTCA |
| | GTTGCGGAGAATCGGTGATGACCTGAATGCGCAATATGAACGCAGACGG |
| | CAGGGGTCCGGGGTGAAACAGACCCTCAATTTCGACTTGCTGAAGCTCGC |
| | CGGGGATGTGGAATCGAATCCGGGTCCACAATGGGCCCGCGAAATCGGG |
| | GCCCAACTCCGCCGGATCGGCGATGATCTCAACGCACAATACGAACGCCG |
| | CCGGCAGGGCTCGGGCGTGAAGCAAACTCTGAATTTCGATCTTCTTAAGC |
| | TCGCTGGTGATGTGGAGTCAAACCCCGGCCCGCAATGGGCGCGCGAAATC |
| | GGAGCACAACTTCGGCGGATCGGAGATGACCTTAATGCTCAATACGAGAG |
| | GCGGCGGCAAGGTTCAGGGGTGAAGCAAACGCTGAACTTTGACCTCCTCA |
| | AGTTGGCGGGCGACGTCGAAAGCAATCCTGGTCCGCAGTGGGCCAGAGA |
| | GATCGGCGCTCAGCTCCGACGCATTGGCGATGACCTTAACGCACAGTACG |
| | AACGGCGCAGACAGGGCTCAGGAGTGAAGCAGACTCTCAACTTCGATCTG |
| | CTCAAACTGGCGGGTGACGTGGAGAGTAACCCGGGACCTCAATGGGCGA |
| | GAGAAATCGGTGCCCAGCTGCGCCGCATCGGGGACGATCTCAATGCCCAA |
| | TACGAAAGACGGCGCCAAGGATCCGGGGTCAAGCAGACGCTTAATTTCG |
| | ACCTCTTGAAGCTGGCTGGTGACGTCGAGTCCAACCCAGGCCCTGGAAAG |
| | CCCATCCCCAACCCGCTGCTCGGACTGGACTCAACT |
| | ((SuperPumaBH3.F2A)\hat{ }10_cV5_DNA2.0) |
| 279 | ATGCAGTGGGCCAGAGAGATTGGTGCCCAAGAAAGGAGAGAAGCGGAT |
| | GACGAAAACGCTCAGTACGAGAGGCGCAGACAAGGCTCGGGAGTCAAG |
| | CAGACTCTGAACTTCGATCTTCTGAAGCTGGCTGGCGATGTGGAAAGCA |
| | ACCCAGGACCGCAGTGGGCGCGCGAGATCGGAGCCCAGGAGAGGAGGG |
| | AGGCCGACGACGAAAATGCACAGTACGAAAGAAGGCGCCAGGGCTCCG |
| | GAGTGAAGCAGACCCTCAACTTTGACTTGCTCAAGCTGGCCGGCGACGT |
| | GGAGAGCAACCCTGGCCCGCAATGGGCTAGAGAAATCGGAGCTCAGGA |
| | GCGGCGGGAAGCAGACGACGAGAATGCGCAGTATGAGCGCCGGCGGCA |
| | GGGAAGCGGTGTCAAGCAAACCCTGAACTTTGATCTGCTCAAACTGGCC |
| | GGGGATGTGGAATCGAACCCCGGACCGGGGAAGCCCATCCCCAACCCGC |
| | TTCTGGGCCTGGACTCCACC |
| | ((KittyCatBH3.F2A)\hat{ }3_cV5) |
| 280 | ATGCAGTGGGCCAGAGAGATTGGTGCCCAAGAAAGGAGAGAAGCGGAT |
| | GACGAAAACGCTCAGTACGAGAGGCGCAGACAAGGAAGCGGAGCTACT |
| | AACTTCAGCCTGCTGAAGCAGGCTGGAGACGTGGAGGAGAACCCTGGAC |
| | CTCAGTGGGCGCGCGAGATCGGAGCCCAGGAGAGGAGGGAGGCCGACG |
| | ACGAAAATGCACAGTACGAAAGAAGGCGCCAGGGAAGCGGAGCTACTA |
| | ACTTCAGCCTGCTGAAGCAGGCTGGAGACGTGGAGGAGAACCCTGGACC |
| | TCAATGGGCTAGAGAAATCGGAGCTCAGGAGCGGCGGGAAGCAGACGA |
| | CGAGAATGCGCAGTATGAGCGCCGGCGGCAGGGAAGCGGTGTCAAGCA |
| | AACCCTGAACTTTGATCTGCTCAAACTGGCCGGGGATGTGGAATCGAAC |
| | CCCGGACCGGGGAAGCCCATCCCCAACCCGCTTCTGGGCCTGGACTCCA |
| | CC |
| | ((KittyCatBH3.P2A)\hat{ }3_cV5) |
| 281 | ATGGAGGAGCAATGGGCTAGAGAGATCGGCGCACAGCTGCGGCGCATG |
| | GCCGATGATCTGAACGCCCAATACGAGAGGAGAGGAAGCGGAGCTACT |
| | AACTTCAGCCTGCTGAAGCAGGCTGGAGACGTGGAGGAGAACCCTGGAC |
| | CTGAGGAACAATGGGCGCGCGAAATCGGTGCCCAGCTCCGCCGGATGGC |
| | AGACGACCTGAACGCGCAGTACGAGCGGCGGGGAAGCGGAGCTACTAA |
| | CTTCAGCCTGCTGAAGCAGGCTGGAGACGTGGAGGAGAACCCTGGACCT |
| | GAAGAACAGTGGGCCAGGGAAATTGGAGCTCAGCTGCGGAGAATGGCC |
| | GACGACCTCAACGCCCAGTACGAACGGCGCGGAAAACCTATCCCGAACC |
| | CACTCTTGGGCCTGGACTCCACC |
| | (PumaBH3(x3.P2A).v5_miR122) |
| 282 | ATGGAGGAGCAATGGGCTAGAGAGATCGGCGCACAGCTGCGGCGCATG |
| | GCCGATGATCTGAACGCCCAATACGAGAGGAGAGGTGGCGGAAGTGGT |
| | GGCGGAAGTGGTGGCGGAAGTGAGGAGCAATGGGCTAGAGAGATCGGC |
| | GCACAGCTGCGGCGCATGGCCGATGATCTGAACGCCCAATACGAGAGGA |
| | GAGGTGGCGGAAGTGGTGGCGGAAGTGGTGGCGGAAGTGAGGAGCAAT |
| | GGGCTAGAGAGATCGGCGCACAGCTGCGGCGCATGGCCGATGATCTGAA |
| | CGCCCAATACGAGCGGCGCGGAAAACCTATCCCGAACCCACTCTTGGGC |
| | CTGGACTCCACC |
| | ((PUMA BH3.GGGSx3)x3.V5) |
| 283 | ATGGAGGAGCAGTGGGCTAGAGAGATCGGGGCACAGCTGCGGCGCATG |
| | GCTGACGACCTGAACGCTCAATACGAGCGCAGAGGAGGCGGATCCGGT |
| | GGCGGAAGCGGTGGAGGAAGTGAGGAGCAATGGGCTAGAGAGATCGGA |
| | GCACAGCTGCGGCGCATGGCCGACGATCTTAACGCACAATACGAAAGGA |
| | GAGGGGGCGGAAGTGGTGGCGGAAGTGGCGGCGGAAGTGAGGAGCAAT |
| | GGGCTAGAGAAATCGGCGCACAGCTGCGGCGCATGGCCGATGATCTGAA |
| | TGCCCAGTACGAACGGCGCGGAAAACCTATCCCGAACCCACTCTTGGGA |
| | CTGGACTCCACC |
| | ((PUMA BH3.GGGSx3)x3.V5_DX) |
| 284 | ATGGAGGAGCAATGGGCTAGAGAGATCGGCGCACAGCTGCGGCGCATG |
| | GCCGATGATCTGAACGCCCAATACGAGAGGAGAGGTGGCGGAAGTGGT |
| | GGCGGAAGTGGTGGCGGAAGTGAGGAGCAATGGGCTAGAGAGATCGGC |
| | GCACAGCTGCGGCGCATGGCCGATGATCTGAACGCCCAATACGAGAGGA |
| | GAGGTGGCGGAAGTGGTGGCGGAAGTGGTGGCGGAAGTGAGGAGCAAT |
| | GGGCTAGAGAGATCGGCGCACAGCTGCGGCGCATGGCCGATGATCTGAA |
| | CGCCCAATACGAGCGGCGCGGAAAACCTATCCCGAACCCACTCTTGGGC |
| | CTGGACTCCACC |
| | (PUMA BH3.GGGSx3.PUMA BH3.V5) |
| 285 | ATGGAGGAGCAATGGGCTAGAGAGATCGGCGCACAGCTGCGGCGCATG |
| | GCCGATGATCTGAACGCCCAATACGAGAGGAGAGGAAGCGGAGCTACT |
| | AACTTCAGCCTGCTGAAGCAGGCTGGAGACGTGGAGGAGAACCCTGGAC |
| | CTGAGGAACAATGGGCGCGCGAAATCGGTGCCCAGCTCCGCCGGATGGC |
| | AGACGACCTGAACGCGCAGTACGAGCGGCGGGGAAGCGGAGCTACTAA |
| | CTTCAGCCTGCTGAAGCAGGCTGGAGACGTGGAGGAGAACCCTGGACCT |
| | GAAGAACAGTGGGCCAGGGAAATTGGAGCTCAGCTGCGGAGAATGGCC |
| | GACGACCTCAACGCCCAGTACGAACGGCGCGGAAAACCTATCCCGAACC |
| | CACTCTTGGGCCTGGACTCCACC |
| | (PumaBH3(x3.P2A).v5_miR122) |
| 286 | MGNRSSHSRLGRIEADSESQEDIIRNIARHLAQVGDSMDRSIPPGMDYKDDDD |
| | K |
| | (hum.BID(61-104).FLAG) |
| 287 | ATGGGCAACCGCAGCAGCCACTCCCGCTTGGGAAGAATAGAGGCAGATT |
| | CTGAAAGTCAAGAAGACATCATCCGGAATATTGCCAGGCACCTCGCCCAG |
| | GTCGGGGACAGCATGGACCGTAGCATCCCTCCGGGCATGGATTACAAGGA |
| | CGATGATGACAAG |
| | (hum.BID(61-104).FLAG) |
| 288 | MGNRSSHSRLGRIEADSESQEDIIRNIARHLAQVGDSMDRSIPPGM |
| | (hum.BID(61-104) without FLAG tag) |
| 289 | MGNRSSHSRLGRIEADSESQEDIIRNIARHLAQVGDSMDRSIPPGLVNGLALQ |
| | LRNTSRSEEDRNRDLATALEQLLQAYPRDMEKEKTMLVLALLLAKKVASHT |
| | PSLLRDVFHTTVNFINQNLRTYVRSLARNGMDMDYKDDDDK |
| | (hum.tBID(61-195).FLAG) |
| 290 | ATGGGCAACCGCAGCAGCCACTCCCGCTTGGGAAGAATAGAGGCAGATT |
| | CTGAAAGTCAAGAAGACATCATCCGGAATATTGCCAGGCACCTCGCCCAG |
| | GTCGGGGACAGCATGGACCGTAGCATCCCTCCGGGCCTGGTGAACGGCCT |
| | GGCCCTGCAGCTCAGGAACACCAGCCGGTCGGAGGAGGACCGGAACAGG |
| | GACCTGGCCACTGCCCTGGAGCAGCTGCTGCAGGCCTACCCTAGAGACAT |
| | GGAGAAGGAGAAGACCATGCTGGTGCTGGCCCTGCTGCTGGCCAAGAAG |
| | GTGGCCAGTCACACGCCGTCCTTGCTCCGTGATGTCTTTCACACAACAGTG |
| | AATTTTATTAACCAGAACCTACGCACCTACGTGAGGAGCTTAGCCAGAAA |
| | TGGGATGGACATGGATTACAAGGACGATGATGACAAG |
| | (hum.tBID(61-195).FLAG) |
| 291 | MGNRSSHSRLGRIEADSESQEDIIRNIARHLAQVGDSMDRSIPPGLVNGLALQ |
| | LRNTSRSEEDRNRDLATALEQLLQAYPRDMEKEKTMLVLALLLAKKVASHT |
| | PSLLRDVFHTTVNFINQNLRTYVRSLARNGMDM |
| | (hum.tBID(61-195) without FLAG tag) |
| 292 | MESQEDIRNIARHLAQVGDSMDRSIPPGLVNGLALQLRNTSRSEEDRNRDLA |
| | TALEQLLQAYPRDMEKEKTMLVLALLLAKKVASHTPSLLRDVFHTTVNFINQ |
| | NLRTYVRSLARNGMDMDYKDDDDK |
| | (hum.tBID(77-195).FLAG) |
| 293 | ATGGAAAGTCAAGAAGACATCATCCGGAATATTGCCAGGCACCTCGCCCA |
| | GGTCGGGGACAGCATGGACCGTAGCATCCCTCCGGGCCTGGTGAACGGCC |
| | TGGCCCTGCAGCTCAGGAACACCAGCCGGTCGGAGGAGGACCGGAACAG |
| | GGACCTGGCCACTGCCCTGGAGCAGCTGCTGCAGGCCTACCCTAGAGACA |
| | TGGAGAAGGAGAAGACCATGCTGGTGCTGGCCCTGCTGCTGGCCAAGAA |
| | GGTGGCCAGTCACACGCCGTCCTTGCTCCGTGATGTCTTTCACACAACAGT |
| | GAATTTTATTAACCAGAACCTACGCACCTACGTGAGGAGCTTAGCCAGAA |
| | ATGGGATGGACATGGATTACAAGGACGATGATGACAAG |
| | (hum.tBID(77-195).FLAG) |
| 294 | MESQEDIIRNIARHLAQVGDSMDRSIPPGLVNGLALQLRNTSRSEEDRNRDLA |
| | TALEQLLQAYPRDMEKEKTMLVLALLLAKKVASHTPSLLRDVFHTTVNFINQ |
| | NLRTYVRSLARNGMDM |
| | (hum.tBID(77-195) without FLAG tag) |
| 295 | UGUAGUGUUUCCUACUUUAUGGA |
| | (miR-142-3p) |
| 296 | CAUAAAGUAGAAAGCACUACU |
| | (miR-142-5p) |
| 297 | GACAGUGCAGUCACCCAUAAAGUAGAAAGCACUACUAACAGCACUGGA |
| | GGGUGUAGUGUUUCCUACUUUAUGGAUGAGUGUACUGUG |
| | (miR-142) |
| 298 | UCCAUAAAGUAGGAAACACUACA |
| | (miR-142-3p binding site) |
| 299 | AGUAGUGCUUUCUACUUUAUG |
| | (miR-142-5p binding site) |
| 300 | ATGGAGGAGCAGTGGGCGCGGGAGATAGGGGCCCAGCTAAGGCGGATGG |
| | CCGACGACCTAAACGCCCAATACGAAAGGAGGGGCTCGGGGGTCAAACA |
| | GACCCTCAATTTCGACCTCCTCAAGCTCGCGGGAGACGTCGAGAGCAACC |
| | CCGGCCCCGAGGAGCAGTGGGCGCGCGAAATAGGGGCCCAGCTCCGGCG |
| | CATGGCCGACGACCTCAACGCGCAATACGAGAGGCGCGGCAGCGGGGTA |
| | AAGCAAACGTTGAACTTCGACCTCCTCAAGCTCGCAGGGGACGTGGAGTC |
| | CAACCCCGGGCCCGAAGAACAATGGGCCCGGGAAATCGGCGCCCAGCTG |
| | CGCCGTATGGCTGACGACCTCAACGCGCAGTATGAACGCCGGGGGAAGC |
| | CCATCCCCAACCCCCTGCTCGGCCTCGATAGCACG |
| | (Puma-BH3 Multimers Codon optimized) |
| 301 | ATGGAGGAGCAGTGGGCCCGCGAGATAGGCGCCCAGCTCCGTAGGATGG |
| | CGGACGATCTAAACGCCCAGTACGAGAGGCGGGGCAGCGGGGTCAAACA |
| | GACATTGAATTTCGACCTCTTGAAGCTCGCCGGCGACGTGGAGAGCAACC |
| | CCGGGCCCGAGGAGCAGTGGGCGCGGGAGATCGGAGCCCAACTCAGGAG |
| | AATGGCCGACGACCTCAACGCCCAGTACGAGCGACGCGGTAGCGGGGTA |
| | AAGCAAACCCTCAACTTCGACCTCCTCAAGCTCGCCGGGGACGTTGAGTC |
| | CAATCCCGGGCCCGAAGAACAGTGGGCCCGGGAGATAGGCGCCCAGCTG |
| | CGTCGTATGGCCGACGATCTGAACGCCCAGTACGAGCGGAGAGGGAAGC |
| | CCATCCCGAACCCGTTGCTGGGGCTGGACAGCACC |
| | (Puma-BH3 Multimers Codon optimized) |
| 302 | ATGGAGGAACAGTGGGCCCGCGAGATCGGCGCCCAACTCCGGCGGATGG |
| | CCGACGATCTCAACGCCCAGTACGAGAGGCGGGGCTCCGGGGTTAAGCA |
| | AACCCTCAATTTCGACCTCCTCAAGCTTGCCGGGGACGTCGAAAGTAACC |
| | CCGGCCCGGAGGAACAGTGGGCCCGGGAGATAGGGGCGCAGCTACGCAG |
| | GATGGCCGACGATCTCAACGCCCAGTACGAGAGGAGGGGGTCGGGGGTC |
| | AAGCAGACCCTCAACTTCGACCTACTCAAGCTCGCCGGCGACGTGGAGAG |
| | CAACCCCGGGCCCGAAGAACAGTGGGCCCGGGAGATCGGGGCCCAGCTG |
| | AGACGGATGGCCGATGACCTGAACGCTCAGTACGAGCGGCGTGGGAAGC |
| | CCATCCCCAACCCCCTGCTGGGTTTAGACAGCACC |
| | (Puma-BH3 Multimers Codon optimized) |
| 303 | ATGGAGGAACAGTGGGCCCGCGAGATCGGCGCCCAGCTCCGCCGCATGG |
| | CGGACGATCTTAACGCCCAATACGAGAGGAGGGGGTCCGGCGTCAAGCA |
| | GACCCTCAACTTCGACCTCCTCAAACTCGCCGGAGACGTCGAGTCCAACC |
| | CCGGTCCCGAAGAACAGTGGGCCCGGGAAATCGGGGCCCAGCTCCGCCG |
| | CATGGCAGACGATCTCAACGCCCAGTACGAGCGGCGCGGGTCCGGGGTC |
| | AAGCAGACTCTCAACTTCGATCTTCTCAAGTTAGCGGGGGACGTGGAGTC |
| | CAATCCAGGTCCGGAGGAGCAGTGGGCCCGGGAGATAGGGGCCCAGCTC |
| | CGCCGAATGGCCGACGACCTGAACGCTCAATATGAGCGCCGGGGGAAAC |
| | CCATCCCCAACCCGCTGCTCGGGCTGGATAGCACT |
| | (Puma-BH3 Multimers Codon optimized) |
| 304 | ATGGAGGAGCAGTGGGCAAGGGAGATAGGAGCTCAGCTCAGGCGGATGG |
| | CCGACGACCTCAACGCGCAGTACGAACGGCGGGGATCCGGAGTCAAACA |
| | GACATTGAATTTCGACCTTCTCAAACTCGCCGGCGACGTTGAGAGCAATC |
| | CCGGGCCCGAGGAACAGTGGGCGCGGGAAATCGGCGCCCAGCTAAGGCG |
| | GATGGCCGACGACCTAAACGCCCAATACGAGCGGCGGGGGTCCGGCGTG |
| | AAGCAGACCCTAAACTTCGACCTCCTGAAGCTTGCCGGGGACGTGGAGAG |
| | CAATCCCGGCCCCGAAGAACAGTGGGCCCGGGAGATCGGGGCCCAGCTG |
| | CGGCGCATGGCTGACGACCTCAACGCCCAGTACGAGCGGCGGGGGAAGC |
| | CCATCCCCAACCCGCTCCTGGGTCTGGACAGCACA |
| | (Puma-BH3 Multimers Codon optimized) |
| 305 | ATGGAGGAACAGTGGGCCAGGGAAATCGGGGCCCAGCTAAGGAGGATGG |
| | CCGACGACCTAAACGCCCAGTACGAACGGCGAGGTAGCGGGGTCAAGCA |
| | GACTCTCAACTTCGACCTCTTGAAACTCGCCGGGGACGTCGAGTCGAATC |
| | CAGGCCCCGAGGAGCAGTGGGCACGAGAAATAGGGGCCCAGCTACGCCG |
| | CATGGCGGACGACCTCAACGCTCAATACGAGCGAAGAGGATCCGGCGTA |
| | AAACAGACGTTGAACTTCGACCTCCTCAAGCTCGCCGGGGACGTAGAGTC |
| | CAATCCGGGCCCTGAGGAACAGTGGGCCCGGGAGATCGGGGCCCAGCTG |
| | CGCCGAATGGCGGACGATCTGAATGCCCAGTATGAGAGGAGGGGGAAGC |
| | CCATCCCAAATCCACTGCTGGGTCTGGATTCGACA |
| | (Puma-BH3 Multimers Codon optimized) |
| 306 | ATGGAGGAGCAGTGGGCGCGAGAGATCGGCGCCCAGCTCCGTAGGATGG |
| | CAGACGACTTAAACGCCCAATACGAACGCCGGGGGAGCGGCGTCAAACA |
| | GACGCTCAACTTCGACTTACTAAAACTAGCCGGCGACGTTGAGAGCAATC |
| | CCGGGCCCGAGGAGCAGTGGGCCCGGGAGATAGGCGCGCAGCTTCGCCG |
| | CATGGCGGACGACCTCAACGCCCAATACGAGCGCCGCGGGTCCGGGGTC |
| | AAGCAGACGCTCAACTTCGACCTCCTCAAACTGGCCGGAGACGTGGAGAG |
| | CAACCCCGGCCCCGAGGAGCAGTGGGCCCGCGAAATCGGGGCCCAGCTG |
| | CGCAGAATGGCGGACGACCTGAACGCGCAGTATGAGCGACGGGGGAAGC |
| | CCATCCCGAACCCCCTGCTCGGACTCGACTCCACT |
| | (Puma-BH3 Multimers Codon optimized) |
| 307 | ATGGAGGAGCAGTGGGCCAGGGAGATCGGCGCACAGCTCCGCCGCATGG |
| | CGGACGACCTCAACGCCCAATACGAACGACGGGGGTCCGGGGTCAAACA |
| | GACGCTCAACTTCGACCTCCTTAAACTCGCCGGCGACGTAGAGTCTAACC |
| | CCGGCCCCGAGGAGCAGTGGGCCCGGGAGATAGGGGCCCAGCTCCGGCG |
| | GATGGCCGACGATCTCAACGCCCAGTACGAGCGTAGGGGGAGCGGCGTT |
| | AAGCAAACGCTTAATTTCGACCTCCTCAAGCTCGCGGGCGACGTCGAGTC |
| | AAACCCCGGGCCAGAGGAGCAGTGGGCCCGTGAGATCGGTGCCCAGCTG |
| | AGGCGAATGGCCGATGACCTGAACGCCCAGTATGAGCGCCGTGGGAAGC |
| | CCATTCCGAATCCTCTCCTGGGTCTGGACAGCACC |
| | (Puma-BH3 Multimers Codon optimized) |
| 308 | ATGGAGGAACAGTGGGCTCGCGAGATCGGGGCTCAGCTCCGTAGGATGG |
| | CCGACGATCTCAACGCCCAGTACGAGCGCAGGGGGAGCGGCGTCAAGCA |
| | GACCTTGAATTTCGACCTCCTCAAGCTCGCCGGAGACGTCGAGTCCAACC |
| | CAGGGCCCGAGGAGCAGTGGGCCCGCGAGATCGGAGCCCAGCTCCGGAG |
| | GATGGCAGACGACTTGAACGCACAGTACGAGCGCCGGGGGTCCGGGGTT |
| | AAGCAAACCCTCAACTTCGACCTCCTTAAGCTGGCAGGCGACGTGGAGTC |
| | GAATCCCGGGCCCGAGGAGCAGTGGGCCAGGGAGATCGGCGCACAGCTG |
| | CGGCGCATGGCCGACGACCTGAACGCGCAGTATGAGCGCCGAGGTAAGC |
| | CCATCCCCAACCCCCTGCTTGGGCTGGACTCCACC |
| | (Puma-BH3 Multimers Codon optimized) |
| 309 | ATGGAGGAGCAGTGGGCCCGAGAGATCGGCGCCCAGCTCAGGCGGATGG |
| | CCGACGACCTTAACGCCCAGTACGAGCGGCGGGGGAGCGGGGTCAAGCA |
| | GACCCTTAATTTCGACCTTCTCAAACTGGCCGGGGACGTCGAGTCGAACC |
| | CCGGGCCAGAGGAGCAGTGGGCCAGGGAGATCGGAGCCCAATTACGACG |
| | GATGGCCGACGACCTCAACGCCCAATACGAGCGGAGGGGGTCCGGAGTC |
| | AAACAGACCCTCAACTTCGATCTCTTGAAGCTCGCAGGAGACGTCGAAAG |
| | CAATCCCGGGCCCGAAGAACAGTGGGCCCGGGAGATAGGGGCACAGCTC |
| | CGCAGGATGGCCGACGATCTGAACGCCCAGTACGAGCGTAGGGGTAAAC |
| | CTATCCCAAACCCACTTCTGGGGCTGGACAGCACT |
| | (Puma-BH3 Multimers Codon optimized) |
| 310 | ATGGAAGAACAGTGGGCTCGCGAGATCGGCGCTCAGCTCCGACGGATGG |
| | CCGACGACTTGAACGCGCAGTACGAGCGCCGGGGGAGCGGAGTCAAGCA |
| | GACACTCAACTTCGACCTCCTAAAGTTGGCGGGCGACGTGGAGAGCAACC |
| | CGGGGCCCGAGGAGCAGTGGGCGAGGGAGATAGGCGCCCAGCTGCGCCG |
| | GATGGCCGACGACTTGAACGCTCAATACGAGCGGAGGGGGTCCGGCGTC |
| | AAGCAGACGCTTAATTTCGACCTCCTCAAGCTCGCCGGCGACGTGGAATC |
| | CAACCCCGGCCCGGAGGAGCAGTGGGCCCGAGAAATCGGAGCCCAACTG |
| | CGGAGGATGGCTGACGACCTGAACGCCCAGTACGAGCGCCGAGGAAAGC |
| | CGATCCCCAACCCCCTGCTGGGACTGGACAGCACG |
| | (Puma-BH3 Multimers Codon optimized) |
| 311 | ATGGAGGAGCAGTGGGCCCGGGAAATCGGGGCCCAGTTACGCAGGATGG |
| | CCGACGATCTAAACGCCCAATACGAGAGGAGGGGCTCGGGGGTAAAACA |
| | GACCCTCAATTTCGATTTGCTCAAACTCGCCGGCGACGTCGAGAGTAACC |
| | CGGGCCCCGAGGAGCAGTGGGCCCGCGAGATCGGGGCGCAGCTCCGGCG |
| | GATGGCAGACGACCTCAACGCGCAGTACGAACGCCGGGGCTCCGGCGTC |
| | AAGCAAACGTTGAACTTCGACCTCCTCAAACTCGCCGGGGACGTAGAGAG |
| | CAACCCCGGGCCCGAGGAGCAGTGGGCTCGTGAGATTGGCGCCCAGCTAC |
| | GCCGTATGGCCGACGACCTCAACGCCCAGTACGAGAGGAGGGGTAAGCC |
| | GATCCCCAACCCCCTGCTGGGGCTGGACTCCACC |
| | (Puma-BH3 Multimers Codon optimized) |
| 312 | ATGGAGGAACAGTGGGCGCGAGAGATCGGGGCCCAGCTCAGGCGGATGG |
| | CCGACGATCTCAACGCCCAGTACGAACGGAGGGGTAGCGGGGTAAAGCA |
| | AACTCTAAACTTCGATCTCCTCAAGCTCGCCGGCGACGTAGAGTCCAATC |
| | CGGGGCCCGAGGAGCAGTGGGCGCGGGAGATCGGCGCCCAGCTCCGGAG |
| | GATGGCAGACGATCTCAACGCCCAGTACGAGCGGAGAGGCAGCGGGGTC |
| | AAACAGACCCTCAACTTCGATCTCCTAAAGCTCGCCGGGGACGTGGAGAG |
| | CAACCCCGGGCCCGAGGAGCAGTGGGCCCGCGAAATCGGTGCCCAGCTTC |
| | GACGTATGGCCGATGATCTGAACGCCCAATACGAGCGGCGCGGCAAACC |
| | CATTCCCAATCCGCTGCTCGGGCTGGACTCCACC |
| | (Puma-BH3 Multimers Codon optimized) |
| 313 | ATGGAGGAGCAGTGGGCCCGGGAAATCGGAGCCCAACTACGGCGCATGG |
| | CCGACGACCTCAACGCCCAATACGAGCGGAGGGGCTCGGGAGTCAAGCA |
| | GACTCTAAATTTCGACCTCCTCAAGCTCGCGGGCGACGTCGAGTCCAACC |
| | CCGGTCCCGAAGAACAGTGGGCACGAGAGATCGGCGCCCAGCTCCGGCG |
| | AATGGCGGACGACCTTAACGCCCAGTACGAGCGGCGGGGGAGCGGGGTC |
| | AAGCAAACACTCAACTTCGACCTACTCAAGCTCGCCGGGGACGTCGAGAG |
| | CAATCCCGGGCCCGAGGAACAGTGGGCCAGGGAGATTGGGGCCCAGCTG |
| | AGGAGGATGGCGGACGACCTGAACGCCCAGTACGAGAGGCGAGGCAAGC |
| | CGATCCCCAATCCCCTGCTGGGCCTGGATTCCACC |
| | (Puma-BH3 Multimers Codon optimized) |
| 314 | ATGGAGGAGCAGTGGGCGCGCGAGATAGGCGCCCAACTCCGTAGGATGG |
| | CCGACGATCTTAACGCCCAGTACGAGCGCCGGGGTAGCGGGGTGAAGCA |
| | GACCCTCAACTTCGACCTTCTCAAGCTTGCCGGGGACGTAGAAAGCAATC |
| | CCGGGCCCGAGGAGCAGTGGGCCAGGGAAATCGGGGCCCAGCTCCGCCG |
| | TATGGCCGACGACCTCAACGCGCAGTACGAGCGCCGAGGGTCGGGAGTC |
| | AAGCAGACCCTCAACTTCGATCTCCTCAAGCTCGCCGGCGACGTGGAAAG |
| | CAACCCGGGCCCCGAAGAACAGTGGGCCCGGGAGATTGGGGCACAGCTG |
| | AGGAGGATGGCCGACGATCTGAACGCCCAGTACGAACGGCGGGGCAAGC |
| | CCATCCCAAACCCGCTGCTAGGACTGGACTCAACG |
| | (Puma-BH3 Multimers Codon optimized) |
| 315 | ATGGAGGAGCAGTGGGCACGAGAAATCGGCGCCCAGCTTCGTCGGATGG |
| | CCGACGATCTCAACGCGCAGTACGAGAGGCGGGGCTCGGGAGTCAAACA |
| | GACCCTCAACTTCGACCTCCTCAAGCTCGCCGGCGACGTCGAGTCCAACC |
| | CGGGCCCGGAAGAACAGTGGGCCAGAGAGATCGGGGCCCAGCTAAGGCG |
| | TATGGCCGACGATCTCAACGCCCAGTACGAGCGGAGGGGCTCCGGCGTCA |
| | AGCAGACCCTTAATTTCGATCTCTTGAAGCTCGCCGGGGACGTCGAAAGC |
| | AATCCCGGGCCCGAGGAACAGTGGGCCCGGGAAATCGGTGCACAGCTCA |
| | GGCGCATGGCGGATGATCTCAACGCCCAATACGAGCGCCGGGGCAAACC |
| | CATACCTAACCCCCTGCTCGGTCTGGACTCCACC |
| | (Puma-BH3 Multimers Codon optimized) |
| 316 | ATGGAGGAGCAGTGGGCGCGGGAGATCGGGGCGCAGCTAAGGAGGATGG |
| | CGGACGATCTCAACGCGCAGTACGAAAGGCGCGGCAGCGGCGTGAAGCA |
| | GACGCTCAACTTCGACCTACTCAAGCTCGCGGGGGACGTCGAATCGAACC |
| | CCGGCCCGGAGGAACAGTGGGCCAGGGAGATCGGCGCCCAGCTACGGCG |
| | TATGGCCGACGACCTCAACGCCCAATACGAGAGGAGGGGGTCGGGAGTC |
| | AAACAGACCCTAAACTTCGACCTCCTCAAGCTCGCCGGGGACGTCGAGTC |
| | CAACCCCGGTCCCGAGGAGCAGTGGGCCAGGGAAATCGGGGCGCAACTG |
| | CGCCGCATGGCCGACGATCTGAACGCCCAGTATGAGCGCAGGGGCAAGC |
| | CGATCCCGAATCCGCTGCTAGGTCTGGACTCCACC |
| | (Puma-BH3 Multimers Codon optimized) |
| 317 | ATGGAGGAGCAGTGGGCCCGCGAGATCGGCGCACAGCTCCGACGAATGG |
| | CCGACGATCTCAACGCCCAATACGAACGGCGGGGGAGCGGAGTCAAGCA |
| | GACTTTAAACTTCGACCTCCTCAAGCTTGCCGGGGACGTGGAAAGTAACC |
| | CCGGACCGGAGGAGCAGTGGGCCCGCGAGATAGGAGCGCAGCTCAGGCG |
| | CATGGCCGACGATCTCAACGCCCAATACGAGCGGAGGGGAAGCGGGGTA |
| | AAACAGACGCTCAACTTCGACCTCCTCAAATTAGCCGGCGACGTGGAGAG |
| | CAACCCCGGGCCCGAGGAGCAGTGGGCCCGCGAGATAGGGGCCCAACTG |
| | CGGCGCATGGCGGACGACCTGAACGCCCAGTACGAGAGGCGGGGCAAGC |
| | CGATCCCTAACCCCCTGCTGGGGTTGGACTCCACC |
| | (Puma-BH3 Multimers Codon optimized) |
| 318 | ATGGAAGAACAGTGGGCACGGGAGATCGGCGCACAGCTAAGGAGGATGG |
| | CCGACGACCTTAACGCGCAGTACGAGCGCAGAGGGAGCGGCGTCAAGCA |
| | GACGCTCAATTTCGACCTTCTCAAGCTCGCGGGGGACGTTGAGTCCAATC |
| | CCGGACCCGAGGAGCAGTGGGCCCGCGAGATAGGGGCCCAGCTCCGGCG |
| | GATGGCAGACGATCTCAACGCCCAATACGAGAGGAGGGGGTCGGGGGTC |
| | AAACAGACCCTTAACTTCGACCTCCTCAAGCTCGCCGGGGACGTCGAGAG |
| | TAACCCCGGACCGGAGGAGCAGTGGGCCCGGGAAATTGGCGCCCAACTC |
| | AGGCGGATGGCCGATGATCTCAACGCCCAGTACGAACGTCGGGGTAAGC |
| | CCATCCCGAACCCCCTGCTGGGGCTGGACTCGACC |
| | (Puma-BH3 Multimers Codon optimized) |
| 319 | ATGGAGGAGCAGTGGGCAAGGGAGATAGGCGCACAGCTCCGTCGGATGG |
| | CCGACGACCTGAACGCCCAATACGAGCGGAGAGGGTCCGGGGTCAAGCA |
| | GACCCTCAATTTCGACTTGCTCAAGCTGGCAGGGGACGTCGAAAGCAACC |
| | CCGGCCCGGAGGAGCAGTGGGCGCGCGAGATCGGCGCCCAGCTTAGGCG |
| | GATGGCCGACGACTTAAACGCGCAATACGAGCGCCGCGGCAGCGGGGTC |
| | AAACAGACCCTAAACTTCGACCTCCTCAAGCTCGCCGGCGACGTGGAGAG |
| | CAACCCCGGCCCCGAAGAACAGTGGGCCCGCGAGATCGGGGCGCAGCTG |
| | CGTAGAATGGCCGACGATCTGAACGCCCAGTATGAGAGGCGGGGCAAAC |
| | CTATCCCGAATCCACTGCTGGGCCTGGACAGCACA |
| | (Puma-BH3 Multimers Codon optimized) |
| 320 | ATGGAGGAACAGTGGGCTCGCGAGATAGGCGCCCAGCTCCGCAGAATGG |
| | CCGACGATCTTAACGCCCAATACGAACGGCGGGGGTCCGGGGTCAAGCA |
| | GACGTTAAACTTCGACCTCCTCAAACTCGCCGGGGACGTGGAGTCCAACC |
| | CCGGGCCCGAGGAGCAGTGGGCGCGCGAGATCGGGGCCCAGCTCCGACG |
| | GATGGCCGACGACCTCAACGCGCAGTACGAGCGCAGAGGAAGCGGGGTC |
| | AAGCAGACCCTCAACTTCGATCTCCTCAAGTTGGCGGGCGACGTTGAAAG |
| | CAACCCCGGACCGGAGGAGCAATGGGCCCGCGAGATCGGGGCCCAACTC |
| | AGGAGGATGGCGGACGACCTGAACGCCCAGTACGAACGGAGGGGGAAAC |
| | CTATCCCCAACCCTCTACTGGGGCTGGACTCTACG |
| | (Puma-BH3 Multimers Codon optimized) |
| 321 | ATGGAGGAACAGTGGGCCCGCGAGATCGGCGCCCAACTCCGTAGGATGG |
| | CCGACGATCTCAACGCCCAGTACGAGAGGAGGGGGAGCGGGGTCAAGCA |
| | GACGCTCAACTTCGACCTCCTCAAGCTCGCCGGGGACGTCGAGTCCAACC |
| | CGGGTCCAGAGGAGCAGTGGGCGAGGGAAATCGGCGCCCAGCTCCGTCG |
| | GATGGCCGACGACCTAAACGCGCAGTACGAGAGGAGGGGTTCCGGCGTT |
| | AAACAAACGCTCAACTTCGACCTCCTCAAACTCGCCGGGGACGTCGAGAG |
| | CAACCCCGGACCCGAGGAGCAGTGGGCTCGGGAGATTGGGGCCCAGCTG |
| | AGGCGGATGGCCGATGACCTGAATGCGCAGTACGAGCGCCGCGGAAAAC |
| | CCATCCCTAACCCGCTGCTCGGCCTGGACTCCACC |
| | (Puma-BH3 Multimers Codon optimized) |
| 322 | ATGGAGGAGCAGTGGGCCCGAGAAATAGGGGCCCAGCTCAGGAGGATGG |
| | CCGACGACCTCAACGCCCAATACGAAAGGAGGGGGTCGGGCGTCAAGCA |
| | GACCCTTAATTTCGACTTGCTTAAGCTTGCCGGGGACGTAGAATCCAACC |
| | CGGGACCCGAGGAGCAGTGGGCCCGAGAAATCGGAGCCCAGCTCCGCCG |
| | AATGGCGGACGATCTCAACGCCCAATACGAGAGGAGGGGATCCGGCGTC |
| | AAGCAGACGCTCAATTTCGACCTCCTCAAACTCGCCGGCGACGTTGAATC |
| | AAACCCGGGGCCGGAAGAACAGTGGGCCAGAGAGATCGGCGCACAGCTG |
| | CGCCGAATGGCCGATGACCTGAACGCCCAGTACGAGCGCCGGGGCAAGC |
| | CCATACCGAACCCCCTCCTGGGCCTGGACTCCACC |
| | (Puma-BH3 Multimers Codon optimized) |
| 323 | ATGGAGGAGCAGTGGGCCCGCGAAATCGGCGCCCAGCTCCGGAGAATGG |
| | CCGACGACCTTAACGCCCAGTACGAAAGGAGGGGCAGCGGGGTCAAACA |
| | GACGCTAAACTTCGACCTCCTCAAGCTCGCCGGGGACGTTGAGTCCAACC |
| | CCGGGCCGGAGGAACAGTGGGCGCGGGAGATCGGGGCGCAGCTTAGGCG |
| | AATGGCCGACGACCTAAACGCCCAGTACGAGCGCAGGGGGTCGGGCGTC |
| | AAGCAGACCCTCAACTTCGACCTCCTTAAACTCGCGGGGGACGTCGAGAG |
| | CAATCCGGGGCCGGAAGAACAGTGGGCTCGGGAGATTGGCGCCCAGCTG |
| | CGGCGCATGGCCGATGACCTGAACGCCCAGTATGAACGCCGCGGTAAGCC |
| | CATCCCGAACCCGCTGCTGGGTCTGGATAGCACC |
| | (Puma-BH3 Multimers Codon optimized) |
| 324 | ATGGAGGAACAGTGGGCCCGGGAGATCGGCGCCCAGCTCAGGCGGATGG |
| | CGGACGACCTCAACGCCCAGTACGAGCGGAGGGGGAGCGGGGTCAAGCA |
| | AACCCTCAATTTCGACCTCCTCAAGTTGGCCGGCGACGTGGAGTCGAACC |
| | CCGGGCCCGAGGAACAGTGGGCCCGCGAGATAGGGGCACAGCTCCGCAG |
| | GATGGCCGACGACCTTAACGCGCAGTACGAGAGGAGGGGCTCGGGAGTT |
| | AAGCAGACCCTCAATTTCGATCTCCTCAAACTAGCCGGGGACGTAGAAAG |
| | CAACCCCGGCCCCGAGGAGCAGTGGGCCCGAGAAATCGGCGCGCAGCTG |
| | AGAAGGATGGCTGACGACCTGAACGCGCAGTATGAGAGACGGGGGAAGC |
| | CGATCCCCAACCCCCTCCTCGGGTTGGACTCCACC |
| | (Puma-BH3 Multimers Codon optimized) |
| 325 | GGGAAATAAGAGAGAAAAGAAGAGTAAGAAGAAATATAAGAGCCACC |
| | (5′ UTR) |
| 326 | TGATAATAGTCCATAAAGTAGGAAACACTACAGCTGGAGCCTCGGTGGCC |
| | ATGCTTCTTGCCCCTTGGGCCCAAACACCATTGTCACACTCCATCCCCCCA |
| | GCCCCTCCTCCCCTTCCTGCACCCGTACCCCCGTGGTCTTTGAATAAAGTC |
| | TGAGTGGGCGGC |
| | (3′ UTR with miR-142-3p (underlined) and miR-122-5p (double underlined) |
| | binding sites) |
| 327 | GGGAAATAAGAGAGAAAAGAAGAGTAAGAAGAAATATAAGAGCCACC |
| | (5′UTR-001) |
| 328 | GGGAGATCAGAGAGAAAAGAAGAGTAAGAAGAAATATAAGAGCCACC |
| | (5′UTR-002) |
| 329 | GGAATAAAAGTCTCAACACAACATATACAAAACAAACGAATCTCAAGCA |
| | ATCAAGCATTCTACTTCTATTGCAGCAATTTAAATCATTTCTTTTAAAGCA |
| | AAAGCAATTTTCTGAAAATTTTCACCATTTACGAACGATAGCAAC |
| | (5′UTR-003) |
| 330 | GGGAGACAAGCUUGGCAUUCCGGUACUGUUGGUAAAGCCACC |
| | (5′UTR-004) |
| 331 | GGGAGATCAGAGAGAAAAGAAGAGTAAGAAGAAATATAAGAGCCACC |
| | (5′UTR-005) |
| 332 | GGAATAAAAGTCTCAACACAACATATACAAAACAAACGAATCTCAAGCA |
| | ATCAAGCATTCTACTTCTATTGCAGCAATTTAAATCATTTCTTTTAAAGCA |
| | AAAGCAATTTTCTGAAAATTTTCACCATTTACGAACGATAGCAAC |
| | (5′UTR-006) |
| 333 | GGGAGACAAGCUUGGCAUUCCGGUACUGUUGGUAAAGCCACC |
| | (5′UTR-007) |
| 334 | GGGAATTAACAGAGAAAAGAAGAGTAAGAAGAAATATAAGAGCCACC |
| | (5′UTR-008) |
| 335 | GGGAAATTAGACAGAAAAGAAGAGTAAGAAGAAATATAAGAGCCACC |
| | (5′UTR-009) |
| 336 | GGGAAATAAGAGAGTAAAGAACAGTAAGAAGAAATATAAGAGCCACC |
| | (5′UTR-010) |
| 337 | GGGAAAAAAGAGAGAAAAGAAGACTAAGAAGAAATATAAGAGCCACC |
| | (5′UTR-011) |
| 338 | GGGAAATAAGAGAGAAAAGAAGAGTAAGAAGATATATAAGAGCCACC |
| | (5′UTR-012) |
| 339 | GGGAAATAAGAGACAAAACAAGAGTAAGAAGAAATATAAGAGCCACC |
| | (5′UTR-013) |
| 340 | GGGAAATTAGAGAGTAAAGAACAGTAAGTAGAATTAAAAGAGCCACC |
| | (5′UTR-014) |
| 341 | GGGAAATAAGAGAGAATAGAAGAGTAAGAAGAAATATAAGAGCCACC |
| | (5′UTR-015) |
| 342 | GGGAAATAAGAGAGAAAAGAAGAGTAAGAAGAAAATTAAGAGCCACC |
| | (5′UTR-016) |
| 343 | GGGAAATAAGAGAGAAAAGAAGAGTAAGAAGAAATTTAAGAGCCACC |
| | (5′UTR-017) |
| 344 | TCAAGCTTTTGGACCCTCGTACAGAAGCTAATACGACTCACTATAGGGAA |
| | ATAAGAGAGAAAAGAAGAGTAAGAAGAAATATAAGAGCCACC |
| | (5′UTR-018) |
| 345 | TGATAATAGTCCATAAAGTAGGAAACACTACAGCTGGAGCCTCGGTGGCC |
| | ATGCTTCTTGCCCCTTGGGCCTCCCCCCAGCCCCTCCTCCCCTTCCTGCACC |
| | CGTACCCCCGTGGTCTTTGAATAAAGTCTGAGTGGGCGGC |
| | (142-3p 5′UTR-001) |
| 346 | TGATAATAGGCTGGAGCCTCGGTGGCTCCATAAAGTAGGAAACACTACAC |
| | ATGCTTCTTGCCCCTTGGGCCTCCCCCCAGCCCCTCCTCCCCTTCCTGCACC |
| | CGTACCCCCGTGGTCTTTGAATAAAGTCTGAGTGGGCGGC |
| | (142-3p 5′UTR-002) |
| 347 | TGATAATAGGCTGGAGCCTCGGTGGCCATGCTTCTTGCCCCTTCCATAAAG |
| | TAGGAAACACTACATGGGCCTCCCCCCAGCCCCTCCTCCCCTTCCTGCACC |
| | CGTACCCCCGTGGTCTTTGAATAAAGTCTGAGTGGGCGGC |
| | (142-3p 5′UTR-003) |
| 348 | TGATAATAGGCTGGAGCCTCGGTGGCCATGCTTCTTGCCCCTTGGGCCTCC |
| | CCCCAGTCCATAAAGTAGGAAACACTACACCCCTCCTCCCCTTCCTGCACC |
| | CGTACCCCCGTGGTCTTTGAATAAAGTCTGAGTGGGCGGC |
| | (142-3p 5′UTR-004) |
| 349 | TGATAATAGGCTGGAGCCTCGGTGGCCATGCTTCTTGCCCCTTGGGCCTCC |
| | CCCCAGCCCCTCCTCCCCTTCTCCATAAAGTAGGAAACACTACACTGCACC |
| | CGTACCCCCGTGGTCTTTGAATAAAGTCTGAGTGGGCGGC |
| | (142-3p 5′UTR-005) |
| 350 | TGATAATAGGCTGGAGCCTCGGTGGCCATGCTTCTTGCCCCTTGGGCCTCC |
| | CCCCAGCCCCTCCTCCCCTTCCTGCACCCGTACCCCCTCCATAAAGTAGGA |
| | AACACTACAGTGGTCTTTGAATAAAGTCTGAGTGGGCGGC |
| | (142-3p 5′UTR-006) |
| 351 | TGATAATAGGCTGGAGCCTCGGTGGCCATGCTTCTTGCCCCTTGGGCCTCC |
| | CCCCAGCCCCTCCTCCCCTTCCTGCACCCGTACCCCCGTGGTCTTTGAATA |
| | AAGTTCCATAAAGTAGGAAACACTACACTGAGTGGGCGGC |
| | (142-3p 5′UTR-007) |
| 352 | GCGCCTGCCCACCTGCCACCGACTGCTGGAACCCAGCCAGTGGGAGGGCC |
| | TGGCCCACCAGAGTCCTGCTCCCTCACTCCTCGCCCCGCCCCCTGTCCCAG |
| | AGTCCCACCTGGGGGCTCTCTCCACCCTTCTCAGAGTTCCAGTTTCAACCA |
| | GAGTTCCAACCAATGGGCTCCATCCTCTGGATTCTGGCCAATGAAATATCT |
| | CCCTGGCAGGGTCCTCTTCTTTTCCCAGAGCTCCACCCCAACCAGGAGCTC |
| | TAGTTAATGGAGAGCTCCCAGCACACTCGGAGCTTGTGCTTTGTCTCCACG |
| | CAAAGCGATAAATAAAAGCATTGGTGGCCTTTGGTCTTTGAATAAAGCCT |
| | GAGTAGGAAGTCTAGA (3′UTR-001) |
| 353 | GCCCCTGCCGCTCCCACCCCCACCCATCTGGGCCCCGGGTTCAAGAGAGA |
| | GCGGGGTCTGATCTCGTGTAGCCATATAGAGTTTGCTTCTGAGTGTCTGCT |
| | TTGTTTAGTAGAGGTGGGCAGGAGGAGCTGAGGGGCTGGGGCTGGGGTG |
| | TTGAAGTTGGCTTTGCATGCCCAGCGATGCGCCTCCCTGTGGGATGTCATC |
| | ACCCTGGGAACCGGGAGTGGCCCTTGGCTCACTGTGTTCTGCATGGTTTG |
| | GATCTGAATTAATTGTCCTTTCTTCTAAATCCCAACCGAACTTCTTCCAAC |
| | CTCCAAACTGGCTGTAACCCCAAATCCAAGCCATTAACTACACCTGACAG |
| | TAGCAATTGTCTGATTAATCACTGGCCCCTTGAAGACAGCAGAATGTCCC |
| | TTTGCAATGAGGAGGAGATCTGGGCTGGGCGGGCCAGCTGGGGAAGCAT |
| | TTGACTATCTGGAACTTGTGTGTGCCTCCTCAGGTATGGCAGTGACTCACC |
| | TGGTTTTAATAAAACAACCTGCAACATCTCATGGTCTTTGAATAAAGCCTG |
| | AGTAGGAAGTCTAGA (3′UTR-002) |
| 354 | ACACACTCCACCTCCAGCACGCGACTTCTCAGGACGACGAATCTTCTCAA |
| | TGGGGGGGCGGCTGAGCTCCAGCCACCCCGCAGTCACTTTCTTTGTAACA |
| | ACTTCCGTTGCTGCCATCGTAAACTGACACAGTGTTTATAACGTGTACATA |
| | CATTAACTTATTACCTCATTTTGTTATTTTTCGAAACAAAGCCCTGTGGAA |
| | GAAAATGGAAAACTTGAAGAAGCATTAAAGTCATTCTGTTAAGCTGCGTA |
| | AATGGTCTTTGAATAAAGCCTGAGTAGGAAGTCTAGA (3′UTR-003) |
| 355 | CATCACATTTAAAAGCATCTCAGCCTACCATGAGAATAAGAGAAAGAAA |
| | ATGAAGATCAAAAGCTTATTCATCTGTTTTTCTTTTTCGTTGGTGTAAAGC |
| | CAACACCCTGTCTAAAAAACATAAATTTCTTTAATCATTTTGCCTCTTTTCT |
| | CTGTGCTTCAATTAATAAAAAATGGAAAGAATCTAATAGAGTGGTACAGC |
| | ACTGTTATTTTTCAAAGATGTGTTGCTATCCTGAAAATTCTGTAGGTTCTG |
| | TGGAAGTTCCAGTGTTCTCTCTTATTCCACTTCGGTAGAGGATTTCTAGTT |
| | TCTTGTGGGCTAATTAAATAAATCATTAATACTCTTCTAATGGTCTTTGAA |
| | TAAAGCCTGAGTAGGAAGTCTAGA (3′UTR-004) |
| 356 | GCTGCCTTCTGCGGGGCTTGCCTTCTGGCCATGCCCTTCTTCTCTCCCTTGC |
| | ACCTGTACCTCTTGGTCTTTGAATAAAGCCTGAGTAGGAAGGCGGCCGCT |
| | CGAGCATGCATCTAGA (3′UTR-005) |
| 357 | GCCAAGCCCTCCCCATCCCATGTATTTATCTCTATTTAATATTTATGTCTAT |
| | TTAAGCCTCATATTTAAAGACAGGGAAGAGCAGAACGGAGCCCCAGGCC |
| | TCTGTGTCCTTCCCTGCATTTCTGAGTTTCATTCTCCTGCCTGTAGCAGTGA |
| | GAAAAAGCTCCTGTCCTCCCATCCCCTGGACTGGGAGGTAGATAGGTAAA |
| | TACCAAGTATTTATTACTATGACTGCTCCCCAGCCCTGGCTCTGCAATGGG |
| | CACTGGGATGAGCCGCTGTGAGCCCCTGGTCCTGAGGGTCCCCACCTGGG |
| | ACCCTTGAGAGTATCAGGTCTCCCACGTGGGAGACAAGAAATCCCTGTTT |
| | AATATTTAAACAGCAGTGTTCCCCATCTGGGTCCTTGCACCCCTCACTCTG |
| | GCCTCAGCCGACTGCACAGCGGCCCCTGCATCCCCTTGGCTGTGAGGCCC |
| | CTGGACAAGCAGAGGTGGCCAGAGCTGGGAGGCATGGCCCTGGGGTCCC |
| | ACGAATTTGCTGGGGAATCTCGTTTTTCTTCTTAAGACTTTTGGGACATGG |
| | TTTGACTCCCGAACATCACCGACGCGTCTCCTGTTTTTCTGGGTGGCCTCG |
| | GGACACCTGCCCTGCCCCCACGAGGGTCAGGACTGTGACTCTTTTTAGGG |
| | CCAGGCAGGTGCCTGGACATTTGCCTTGCTGGACGGGGACTGGGGATGTG |
| | GGAGGGAGCAGACAGGAGGAATCATGTCAGGCCTGTGTGTGAAAGGAAG |
| | CTCCACTGTCACCCTCCACCTCTTCACCCCCCACTCACCAGTGTCCCCTCC |
| | ACTGTCACATTGTAACTGAACTTCAGGATAATAAAGTGTTTGCCTCCATGG |
| | TCTTTGAATAAAGCCTGAGTAGGAAGGCGGCCGCTCGAGCATGCATCTAG |
| | A (3′UTR-006) |
| 358 | ACTCAATCTAAATTAAAAAAGAAAGAAATTTGAAAAAACTTTCTCTTTGC |
| | CATTTCTTCTTCTTCTTTTTTAACTGAAAGCTGAATCCTTCCATTTCTTCTG |
| | CACATCTACTTGCTTAAATTGTGGGCAAAAGAGAAAAAGAAGGATTGATC |
| | AGAGCATTGTGCAATACAGTTTCATTAACTCCTTCCCCCGCTCCCCCAAAA |
| | ATTTGAATTTTTTTTTCAACACTCTTACACCTGTTATGGAAAATGTCAACC |
| | TTTGTAAGAAAACCAAAATAAAAATTGAAAAATAAAAACCATAAACATTT |
| | GCACCACTTGTGGCTTTTGAATATCTTCCACAGAGGGAAGTTTAAAACCC |
| | AAACTTCCAAAGGTTTAAACTACCTCAAAACACTTTCCCATGAGTGTGAT |
| | CCACATTGTTAGGTGCTGACCTAGACAGAGATGAACTGAGGTCCTTGTTTT |
| | GTTTTGTTCATAATACAAAGGTGCTAATTAATAGTATTTCAGATACTTGAA |
| | GAATGTTGATGGTGCTAGAAGAATTTGAGAAGAAATACTCCTGTATTGAG |
| | TTGTATCGTGTGGTGTATTTTTTAAAAAATTTGATTTAGCATTCATATTTTC |
| | CATCTTATTCCCAATTAAAAGTATGCAGATTATTTGCCCAAATCTTCTTCA |
| | GATTCAGCATTTGTTCTTTGCCAGTCTCATTTTCATCTTCTTCCATGGTTCC |
| | ACAGAAGCTTTGTTTCTTGGGCAAGCAGAAAAATTAAATTGTACCTATTTT |
| | GTATATGTGAGATGTTTAAATAAATTGTGAAAAAAATGAAATAAAGCATG |
| | TTTGGTTTTCCAAAAGAACATAT (3′UTR-007) |
| 359 | CGCCGCCGCCCGGGCCCCGCAGTCGAGGGTCGTGAGCCCACCCCGTCCAT |
| | GGTGCTAAGCGGGCCCGGGTCCCACACGGCCAGCACCGCTGCTCACTCGG |
| | ACGACGCCCTGGGCCTGCACCTCTCCAGCTCCTCCCACGGGGTCCCCGTA |
| | GCCCCGGCCCCCGCCCAGCCCCAGGTCTCCCCAGGCCCTCCGCAGGCTGC |
| | CCGGCCTCCCTCCCCCTGCAGCCATCCCAAGGCTCCTGACCTACCTGGCCC |
| | CTGAGCTCTGGAGCAAGCCCTGACCCAATAAAGGCTTTGAACCCAT |
| | (3′UTR-008) |
| 360 | GGGGCTAGAGCCCTCTCCGCACAGCGTGGAGACGGGGCAAGGAGGGGGG |
| | TTATTAGGATTGGTGGTTTTGTTTTGCTTTGTTTAAAGCCGTGGGAAAATG |
| | GCACAACTTTACCTCTGTGGGAGATGCAACACTGAGAGCCAAGGGGTGGG |
| | AGTTGGGATAATTTTTATATAAAAGAAGTTTTTCCACTTTGAATTGCTAAA |
| | AGTGGCATTTTTCCTATGTGCAGTCACTCCTCTCATTTCTAAAATAGGGAC |
| | GTGGCCAGGCACGGTGGCTCATGCCTGTAATCCCAGCACTTTGGGAGGCC |
| | GAGGCAGGCGGCTCACGAGGTCAGGAGATCGAGACTATCCTGGCTAACA |
| | CGGTAAAACCCTGTCTCTACTAAAAGTACAAAAAATTAGCTGGGCGTGGT |
| | GGTGGGCACCTGTAGTCCCAGCTACTCGGGAGGCTGAGGCAGGAGAAAG |
| | GCATGAATCCAAGAGGCAGAGCTTGCAGTGAGCTGAGATCACGCCATTGC |
| | ACTCCAGCCTGGGCAACAGTGTTAAGACTCTGTCTCAAATATAAATAAAT |
| | AAATAAATAAATAAATAAATAAATAAAAATAAAGCGAGATGTTGCCCTC |
| | AAA (3′UTR-009) |
| 361 | GGCCCTGCCCCGTCGGACTGCCCCCAGAAAGCCTCCTGCCCCCTGCCAGT |
| | GAAGTCCTTCAGTGAGCCCCTCCCCAGCCAGCCCTTCCCTGGCCCCGCCG |
| | GATGTATAAATGTAAAAATGAAGGAATTACATTTTATATGTGAGCGAGCA |
| | AGCCGGCAAGCGAGCACAGTATTATTTCTCCATCCCCTCCCTGCCTGCTCC |
| | TTGGCACCCCCATGCTGCCTTCAGGGAGACAGGCAGGGAGGGCTTGGGGC |
| | TGCACCTCCTACCCTCCCACCAGAACGCACCCCACTGGGAGAGCTGGTGG |
| | TGCAGCCTTCCCCTCCCTGTATAAGACACTTTGCCAAGGCTCTCCCCTCTC |
| | GCCCCATCCCTGCTTGCCCGCTCCCACAGCTTCCTGAGGGCTAATTCTGGG |
| | AAGGGAGAGTTCTTTGCTGCCCCTGTCTGGAAGACGTGGCTCTGGGTGAG |
| | GTAGGCGGGAAAGGATGGAGTGTTTTAGTTCTTGGGGGAGGCCACCCCAA |
| | ACCCCAGCCCCAACTCCAGGGGCACCTATGAGATGGCCATGCTCAACCCC |
| | CCTCCCAGACAGGCCCTCCCTGTCTCCAGGGCCCCCACCGAGGTTCCCAG |
| | GGCTGGAGACTTCCTCTGGTAAACATTCCTCCAGCCTCCCCTCCCCTGGGG |
| | ACGCCAAGGAGGTGGGCCACACCCAGGAAGGGAAAGCGGGCAGCCCCGT |
| | TTTGGGGACGTGAACGTTTTAATAATTTTTGCTGAATTCCTTTACAACTAA |
| | ATAACACAGATATTGTTATAAATAAAATTGT (3′UTR-010) |
| 362 | ATATTAAGGATCAAGCTGTTAGCTAATAATGCCACCTCTGCAGTTTTGGG |
| | AACAGGCAAATAAAGTATCAGTATACATGGTGATGTACATCTGTAGCAAA |
| | GCTCTTGGAGAAAATGAAGACTGAAGAAAGCAAAGCAAAAACTGTATAG |
| | AGAGATTTTTCAAAAGCAGTAATCCCTCAATTTTAAAAAAGGATTGAAAA |
| | TTCTAAATGTCTTTCTGTGCATATTTTTTGTGTTAGGAATCAAAAGTATTTT |
| | ATAAAAGGAGAAAGAACAGCCTCATTTTAGATGTAGTCCTGTTGGATTTT |
| | TTATGCCTCCTCAGTAACCAGAAATGTTTTAAAAAACTAAGTGTTTAGGAT |
| | TTCAAGACAACATTATACATGGCTCTGAAATATCTGACACAATGTAAACA |
| | TTGCAGGCACCTGCATTTTATGTTTTTTTTTTCAACAAATGTGACTAATTTG |
| | AAACTTTTATGAACTTCTGAGCTGTCCCCTTGCAATTCAACCGCAGTTTGA |
| | ATTAATCATATCAAATCAGTTTTAATTTTTTAAATTGTACTTCAGAGTCTA |
| | TATTTCAAGGGCACATTTTCTCACTACTATTTTAATACATTAAAGGACTAA |
| | ATAATCTTTCAGAGATGCTGGAAACAAATCATTTGCTTTATATGTTTCATT |
| | AGAATACCAATGAAACATACAACTTGAAAATTAGTAATAGTATTTTTGAA |
| | GATCCCATTTCTAATTGGAGATCTCTTTAATTTCGATCAACTTATAATGTG |
| | TAGTACTATATTAAGTGCACTTGAGTGGAATTCAACATTTGACTAATAAA |
| | ATGAGTTCATCATGTTGGCAAGTGATGTGGCAATTATCTCTGGTGACAAA |
| | AGAGTAAAATCAAATATTTCTGCCTGTTACAAATATCAAGGAAGACCTGC |
| | TACTATGAAATAGATGACATTAATCTGTCTTCACTGTTTATAATACGGATG |
| | GATTTTTTTTCAAATCAGTGTGTGTTTTGAGGTCTTATGTAATTGATGACA |
| | TTTGAGAGAAATGGTGGCTTTTTTTAGCTACCTCTTTGTTCATTTAAGCAC |
| | CAGTAAAGATCATGTCTTTTTATAGAAGTGTAGATTTTCTTTGTGACTTTG |
| | CTATCGTGCCTAAAGCTCTAAATATAGGTGAATGTGTGATGAATACTCAG |
| | ATTATTTGTCTCTCTATATAATTAGTTTGGTACTAAGTTTCTCAAAAAATT |
| | ATTAACACATGAAAGACAATCTCTAAACCAGAAAAAGAAGTAGTACAAA |
| | TTTTGTTACTGTAATGCTCGCGTTTAGTGAGTTTAAAACACACAGTATCTT |
| | TTGGTTTTATAATCAGTTTCTATTTTGCTGTGCCTGAGATTAAGATCTGTGT |
| | ATGTGTGTGTGTGTGTGTGTGCGTTTGTGTGTTAAAGCAGAAAAGACTTTT |
| | TTAAAAGTTTTAAGTGATAAATGCAATTTGTTAATTGATCTTAGATCACTA |
| | GTAAACTCAGGGCTGAATTATACCATGTATATTCTATTAGAAGAAAGTAA |
| | ACACCATCTTTATTCCTGCCCTTTTTCTTCTCTCAAAGTAGTTGTAGTTATA |
| | TCTAGAAAGAAGCAATTTTGATTTCTTGAAAAGGTAGTTCCTGCACTCAGT |
| | TTAAACTAAAAATAATCATACTTGGATTTTATTTATTTTTGTCATAGTAAA |
| | AATTTTAATTTATATATATTTTTATTTAGTATTATCTTATTCTTTGCTATTTG |
| | CCAATCCTTTGTCATCAATTGTGTTAAATGAATTGAAAATTCATGCCCTGT |
| | TCATTTTATTTTACTTTATTGGTTAGGATATTTAAAGGATTTTTGTATATAT |
| | AATTTCTTAAATTAATATTCCAAAAGGTTAGTGGACTTAGATTATAAATTA |
| | TGGCAAAAATCTAAAAACAACAAAAATGATTTTTATACATTCTATTTCATT |
| | ATTCCTCTTTTTCCAATAAGTCATACAATTGGTAGATATGACTTATTTTATT |
| | TTTGTATTATTCACTATATCTTTATGATATTTAAGTATAAATAATTAAAAA |
| | AATTTATTGTACCTTATAGTCTGTCACCAAAAAAAAAAAATTATCTGTAG |
| | GTAGTGAAATGCTAATGTTGATTTGTCTTTAAGGGCTTGTTAACTATCCTT |
| | TATTTTCTCATTTGTCTTAAATTAGGAGTTTGTGTTTAAATTACTCATCTAA |
| | GCAAAAAATGTATATAAATCCCATTACTGGGTATATACCCAAAGGATTAT |
| | AAATCATGCTGCTATAAAGACACATGCACACGTATGTTTATTGCAGCACT |
| | ATTCACAATAGCAAAGACTTGGAACCAACCCAAATGTCCATCAATGATAG |
| | ACTTGATTAAGAAAATGTGCACATATACACCATGGAATACTATGCAGCCA |
| | TAAAAAAGGATGAGTTCATGTCCTTTGTAGGGACATGGATAAAGCTGGAA |
| | ACCATCATTCTGAGCAAACTATTGCAAGGACAGAAAACCAAACACTGCAT |
| | GTTCTCACTCATAGGTGGGAATTGAACAATGAGAACACTTGGACACAAGG |
| | TGGGGAACACCACACACCAGGGCCTGTCATGGGGTGGGGGGAGTGGGGA |
| | GGGATAGCATTAGGAGATATACCTAATGTAAATGATGAGTTAATGGGTGC |
| | AGCACACCAACATGGCACATGTATACATATGTAGCAAACCTGCACGTTGT |
| | GCACATGTACCCTAGAACTTAAAGTATAATTAAAAAAAAAAAGAAAACA |
| | GAAGCTATTTATAAAGAAGTTATTTGCTGAAATAAATGTGATCTTTCCCAT |
| | TAAAAAAATAAAGAAATTTTGGGGTAAAAAAACACAATATATTGTATTCT |
| | TGAAAAATTCTAAGAGAGTGGATGTGAAGTGTTCTCACCACAAAAGTGAT |
| | AACTAATTGAGGTAATGCACATATTAATTAGAAAGATTTTGTCATTCCAC |
| | AATGTATATATACTTAAAAATATGTTATACACAATAAATACATACATTAA |
| | AAAATAAGTAAATGTA (3′UTR-011) |
| 363 | CCCACCCTGCACGCCGGCACCAAACCCTGTCCTCCCACCCCTCCCCACTCA |
| | TCACTAAACAGAGTAAAATGTGATGCGAATTTTCCCGACCAACCTGATTC |
| | GCTAGATTTTTTTTAAGGAAAAGCTTGGAAAGCCAGGACACAACGCTGCT |
| | GCCTGCTTTGTGCAGGGTCCTCCGGGGCTCAGCCCTGAGTTGGCATCACCT |
| | GCGCAGGGCCCTCTGGGGCTCAGCCCTGAGCTAGTGTCACCTGCACAGGG |
| | CCCTCTGAGGCTCAGCCCTGAGCTGGCGTCACCTGTGCAGGGCCCTCTGG |
| | GGCTCAGCCCTGAGCTGGCCTCACCTGGGTTCCCCACCCCGGGCTCTCCTG |
| | CCCTGCCCTCCTGCCCGCCCTCCCTCCTGCCTGCGCAGCTCCTTCCCTAGG |
| | CACCTCTGTGCTGCATCCCACCAGCCTGAGCAAGACGCCCTCTCGGGGCC |
| | TGTGCCGCACTAGCCTCCCTCTCCTCTGTCCCCATAGCTGGTTTTTCCCACC |
| | AATCCTCACCTAACAGTTACTTTACAATTAAACTCAAAGCAAGCTCTTCTC |
| | CTCAGCTTGGGGCAGCCATTGGCCTCTGTCTCGTTTTGGGAAACCAAGGTC |
| | AGGAGGCCGTTGCAGACATAAATCTCGGCGACTCGGCCCCGTCTCCTGAG |
| | GGTCCTGCTGGTGACCGGCCTGGACCTTGGCCCTACAGCCCTGGAGGCCG |
| | CTGCTGACCAGCACTGACCCCGACCTCAGAGAGTACTCGCAGGGGCGCTG |
| | GCTGCACTCAAGACCCTCGAGATTAACGGTGCTAACCCCGTCTGCTCCTCC |
| | CTCCCGCAGAGACTGGGGCCTGGACTGGACATGAGAGCCCCTTGGTGCCA |
| | CAGAGGGCTGTGTCTTACTAGAAACAACGCAAACCTCTCCTTCCTCAGAA |
| | TAGTGATGTGTTCGACGTTTTATCAAAGGCCCCCTTTCTATGTTCATGTTA |
| | GTTTTGCTCCTTCTGTGTTTTTTTCTGAACCATATCCATGTTGCTGACTTTT |
| | CCAAATAAAGGTTTTCACTCCTCTC (3′UTR-012) |
| 364 | AGAGGCCTGCCTCCAGGGCTGGACTGAGGCCTGAGCGCTCCTGCCGCAGA |
| | GCTGGCCGCGCCAAATAATGTCTCTGTGAGACTCGAGAACTTTCATTTTTT |
| | TCCAGGCTGGTTCGGATTTGGGGTGGATTTTGGTTTTGTTCCCCTCCTCCA |
| | CTCTCCCCCACCCCCTCCCCGCCCTTTTTTTTTTTTTTTTTTAAACTGGTATT |
| | TTATCTTTGATTCTCCTTCAGCCCTCACCCCTGGTTCTCATCTTTCTTGATC |
| | AACATCTTTTCTTGCCTCTGTCCCCTTCTCTCATCTCTTAGCTCCCCTCCAA |
| | CCTGGGGGGCAGTGGTGTGGAGAAGCCACAGGCCTGAGATTTCATCTGCT |
| | CTCCTTCCTGGAGCCCAGAGGAGGGCAGCAGAAGGGGGTGGTGTCTCCAA |
| | CCCCCCAGCACTGAGGAAGAACGGGGCTCTTCTCATTTCACCCCTCCCTTT |
| | CTCCCCTGCCCCCAGGACTGGGCCACTTCTGGGTGGGGCAGTGGGTCCCA |
| | GATTGGCTCACACTGAGAATGTAAGAACTACAAACAAAATTTCTATTAAA |
| | TTAAATTTTGTGTCTCC (3′UTR-013) |
| 365 | CTCCCTCCATCCCAACCTGGCTCCCTCCCACCCAACCAACTTTCCCCCCAA |
| | CCCGGAAACAGACAAGCAACCCAAACTGAACCCCCTCAAAAGCCAAAAA |
| | ATGGGAGACAATTTCACATGGACTTTGGAAAATATTTTTTTCCTTTGCATT |
| | CATCTCTCAAACTTAGTTTTTATCTTTGACCAACCGAACATGACCAAAAAC |
| | CAAAAGTGCATTCAACCTTACCAAAAAAAAAAAAAAAAAAAGAATAAAT |
| | AAATAACTTTTTAAAAAAGGAAGCTTGGTCCACTTGCTTGAAGACCCATG |
| | CGGGGGTAAGTCCCTTTCTGCCCGTTGGGCTTATGAAACCCCAATGCTGCC |
| | CTTTCTGCTCCTTTCTCCACACCCCCCTTGGGGCCTCCCCTCCACTCCTTCC |
| | CAAATCTGTCTCCCCAGAAGACACAGGAAACAATGTATTGTCTGCCCAGC |
| | AATCAAAGGCAATGCTCAAACACCCAAGTGGCCCCCACCCTCAGCCCGCT |
| | CCTGCCCGCCCAGCACCCCCAGGCCCTGGGGGACCTGGGGTTCTCAGACT |
| | GCCAAAGAAGCCTTGCCATCTGGCGCTCCCATGGCTCTTGCAACATCTCCC |
| | CTTCGTTTTTGAGGGGGTCATGCCGGGGGAGCCACCAGCCCCTCACTGGG |
| | TTCGGAGGAGAGTCAGGAAGGGCCACGACAAAGCAGAAACATCGGATTT |
| | GGGGAACGCGTGTCAATCCCTTGTGCCGCAGGGCTGGGCGGGAGAGACT |
| | GTTCTGTTCCTTGTGTAACTGTGTTGCTGAAAGACTACCTCGTTCTTGTCTT |
| | GATGTGTCACCGGGGCAACTGCCTGGGGGCGGGGATGGGGGCAGGGTGG |
| | AAGCGGCTCCCCATTTTATACCAAAGGTGCTACATCTATGTGATGGGTGG |
| | GGTGGGGAGGGAATCACTGGTGCTATAGAAATTGAGATGCCCCCCCAGGC |
| | CAGCAAATGTTCCTTTTTGTTCAAAGTCTATTTTTATTCCTTGATATTTTTC |
| | TTTTTTTTTTTTTTTTTTTGTGGATGGGGACTTGTGAATTTTTCTAAAGGTG |
| | CTATTTAACATGGGAGGAGAGCGTGTGCGGCTCCAGCCCAGCCCGCTGCT |
| | CACTTTCCACCCTCTCTCCACCTGCCTCTGGCTTCTCAGGCCTCTGCTCTCC |
| | GACCTCTCTCCTCTGAAACCCTCCTCCACAGCTGCAGCCCATCCTCCCGGC |
| | TCCCTCCTAGTCTGTCCTGCGTCCTCTGTCCCCGGGTTTCAGAGACAACTT |
| | CCCAAAGCACAAAGCAGTTTTTCCCCCTAGGGGTGGGAGGAAGCAAAAG |
| | ACTCTGTACCTATTTTGTATGTGTATAATAATTTGAGATGTTTTTAATTATT |
| | TTGATTGCTGGAATAAAGCATGTGGAAATGACCCAAACATAATCCGCAGT |
| | GGCCTCCTAATTTCCTTCTTTGGAGTTGGGGGAGGGGTAGACATGGGGAA |
| | GGGGCTTTGGGGTGATGGGCTTGCCTTCCATTCCTGCCCTTTCCCTCCCCA |
| | CTATTCTCTTCTAGATCCCTCCATAACCCCACTCCCCTTTCTCTCACCCTTC |
| | TTATACCGCAAACCTTTCTACTTCCTCTTTCATTTTCTATTCTTGCAATTTC |
| | CTTGCACCTTTTCCAAATCCTCTTCTCCCCTGCAATACCATACAGGCAATC |
| | CACGTGCACAACACACACACACACTCTTCACATCTGGGGTTGTCCAAACC |
| | TCATACCCACTCCCCTTCAAGCCCATCCACTCTCCACCCCCTGGATGCCCT |
| | GCACTTGGTGGCGGTGGGATGCTCATGGATACTGGGAGGGTGAGGGGAG |
| | TGGAACCCGTGAGGAGGACCTGGGGGCCTCTCCTTGAACTGACATGAAGG |
| | GTCATCTGGCCTCTGCTCCCTTCTCACCCACGCTGACCTCCTGCCGAAGGA |
| | GCAACGCAACAGGAGAGGGGTCTGCTGAGCCTGGCGAGGGTCTGGGAGG |
| | GACCAGGAGGAAGGCGTGCTCCCTGCTCGCTGTCCTGGCCCTGGGGGAGT |
| | GAGGGAGACAGACACCTGGGAGAGCTGTGGGGAAGGCACTCGCACCGTG |
| | CTCTTGGGAAGGAAGGAGACCTGGCCCTGCTCACCACGGACTGGGTGCCT |
| | CGACCTCCTGAATCCCCAGAACACAACCCCCCTGGGCTGGGGTGGTCTGG |
| | GGAACCATCGTGCCCCCGCCTCCCGCCTACTCCTTTTTAAGCTT |
| | (3′UTR-014) |
| 366 | TTGGCCAGGCCTGACCCTCTTGGACCTTTCTTCTTTGCCGACAACCACTGC |
| | CCAGCAGCCTCTGGGACCTCGGGGTCCCAGGGAACCCAGTCCAGCCTCCT |
| | GGCTGTTGACTTCCCATTGCTCTTGGAGCCACCAATCAAAGAGATTCAAA |
| | GAGATTCCTGCAGGCCAGAGGCGGAACACACCTTTATGGCTGGGGCTCTC |
| | CGTGGTGTTCTGGACCCAGCCCCTGGAGACACCATTCACTTTTACTGCTTT |
| | GTAGTGACTCGTGCTCTCCAACCTGTCTTCCTGAAAAACCAAGGCCCCCTT |
| | CCCCCACCTCTTCCATGGGGTGAGACTTGAGCAGAACAGGGGCTTCCCCA |
| | AGTTGCCCAGAAAGACTGTCTGGGTGAGAAGCCATGGCCAGAGCTTCTCC |
| | CAGGCACAGGTGTTGCACCAGGGACTTCTGCTTCAAGTTTTGGGGTAAAG |
| | ACACCTGGATCAGACTCCAAGGGCTGCCCTGAGTCTGGGACTTCTGCCTC |
| | CATGGCTGGTCATGAGAGCAAACCGTAGTCCCCTGGAGACAGCGACTCCA |
| | GAGAACCTCTTGGGAGACAGAAGAGGCATCTGTGCACAGCTCGATCTTCT |
| | ACTTGCCTGTGGGGAGGGGAGTGACAGGTCCACACACCACACTGGGTCAC |
| | CCTGTCCTGGATGCCTCTGAAGAGAGGGACAGACCGTCAGAAACTGGAG |
| | AGTTTCTATTAAAGGTCATTTAAACCA (3′UTR-015) |
| 367 | TCCTCCGGGACCCCAGCCCTCAGGATTCCTGATGCTCCAAGGCGACTGAT |
| | GGGCGCTGGATGAAGTGGCACAGTCAGCTTCCCTGGGGGCTGGTGTCATG |
| | TTGGGCTCCTGGGGCGGGGGCACGGCCTGGCATTTCACGCATTGCTGCCA |
| | CCCCAGGTCCACCTGTCTCCACTTTCACAGCCTCCAAGTCTGTGGCTCTTC |
| | CCTTCTGTCCTCCGAGGGGCTTGCCTTCTCTCGTGTCCAGTGAGGTGCTCA |
| | GTGATCGGCTTAACTTAGAGAAGCCCGCCCCCTCCCCTTCTCCGTCTGTCC |
| | CAAGAGGGTCTGCTCTGAGCCTGCGTTCCTAGGTGGCTCGGCCTCAGCTG |
| | CCTGGGTTGTGGCCGCCCTAGCATCCTGTATGCCCACAGCTACTGGAATCC |
| | CCGCTGCTGCTCCGGGCCAAGCTTCTGGTTGATTAATGAGGGCATGGGGT |
| | GGTCCCTCAAGACCTTCCCCTACCTTTTGTGGAACCAGTGATGCCTCAAAG |
| | ACAGTGTCCCCTCCACAGCTGGGTGCCAGGGGCAGGGGATCCTCAGTATA |
| | GCCGGTGAACCCTGATACCAGGAGCCTGGGCCTCCCTGAACCCCTGGCTT |
| | CCAGCCATCTCATCGCCAGCCTCCTCCTGGACCTCTTGGCCCCCAGCCCCT |
| | TCCCCACACAGCCCCAGAAGGGTCCCAGAGCTGACCCCACTCCAGGACCT |
| | AGGCCCAGCCCCTCAGCCTCATCTGGAGCCCCTGAAGACCAGTCCCACCC |
| | ACCTTTCTGGCCTCATCTGACACTGCTCCGCATCCTGCTGTGTGTCCTGTTC |
| | CATGTTCCGGTTCCATCCAAATACACTTTCTGGAACAAA (3′UTR-016) |
| 368 | GCTGGAGCCTCGGTGGCCATGCTTCTTGCCCCTTGGGCCTCCCCCCAGCCC |
| | CTCCTCCCCTTCCTGCACCCGTACCCCCGTGGTCTTTGAATAAAGTCTGAG |
| | TGGGCGGC (3′UTR-017) |
| 369 | TGATAATAGGCTGGAGCCTCGGTGGCCATGCTTCTTGCCCCTTGGGCCTCC |
| | CCCCAGCCCCTCCTCCCCTTCCTGCACCCGTACCCCCGTGGTCTTTGAATA |
| | AAGTCTGAGTGGGCGGC (3′UTR-018) |
| 370 | MEEQWAREIGAQLRRMADDLNAQYERRGSGVKQTLNFDLLKLAGDVESNP |
| | GPEEQWAREIGAQLRRMADDLNAQYERRGSGVKQTLNFDLLKLAGDVESNP |
| | GPEEQWAREIGAQLRRMADDLNAQYERRGKPIPNPLLGLDST |
| | (Puma BH3 (x3P2A).v5 |
| 371 | ATGGAGGAGCAATGGGCTAGAGAGATCGGCGCACAGCTGCGGCGCATGGC |
| | CGATGATCTGAACGCCCAATACGAGAGGAGAGGTTCCGGAGTGAAGCAGA |
| | CTCTGAACTTCGATCTGCTCAAGCTTGCGGGCGACGTGGAATCGAACCCCG |
| | GCCCTGAGGAACAATGGGCGCGCGAAATCGGTGCCCAGCTCCGCCGGATG |
| | GCAGACGACCTGAACGCGCAGTACGAGCGGCGGGGGAGCGGGGTCAAGC |
| | AGACCCTGAATTTCGACCTTCTGAAGCTGGCCGGAGATGTGGAGTCAAAC |
| | CCGGGACCCGAAGAACAGTGGGCCAGGGAAATTGGAGCTCAGCTGCGGA |
| | GAATGGCCGACGACCTCAACGCCCAGTACGAACGGCGCGGAAAACCTATC |
| | CCGAACCCACTCTTGGGCCTGGACTCCACC (Puma BH3 (x3P2A).v5 |
| 372 | TCAAGCTTTTGGACCCTCGTACAGAAGCTAATACGACTCACTATAGGGAA |
| | ATAAGAGAGAAAAGAAGAGTAAGAAGAAATATAAGAGCCACCATGATGG |
| | AAGGAATCAGCAACTTCAAGACCCCATCCAAGCTGTCCGAGAAGAAAAA |
| | GGGTTCCGGAGTGAAGCAGACCCTGAACTTCGATCTGCTCAAGCTCGCCG |
| | GGGACGTGGAAAGCAACCCTGGTCCCATGGAGGGCATCTCGAACTTTAAG |
| | ACCCCCTCGAAGCTTTCGGAGAAGAAGAAGGGATCCGGCGTCAAGCAGA |
| | CTCTGAATTTCGACTTGCTGAAGCTCGCGGGCGATGTGGAATCAAACCCG |
| | GGGCCTATGGAAGGCATCTCCAACTTCAAAACTCCGTCCAAGCTGAGCGA |
| | GAAAAAGAAGGGAAAGCCCATTCCGAACCCTCTGCTGGGACTGGACAGC |
| | ACCTGATAATAGGCTGGAGCCTCGGTGGCCATGCTTCTTGCCCCTTGGGCC |
| | TCCCCCCAGCCCCTCCTCCCCTTCCTGCACCCGTACCCCCGTGGTCTTTGA |
| | ATAAAGTCTGAGTGGGCGGC |
| | (TandemPep.TOPK_codon optimized (5′ UTR, ORF, 3′ UTR) |
| 373 | TCAAGCTTTTGGACCCTCGTACAGAAGCTAATACGACTCACTATAGGGAA |
| | ATAAGAGAGAAAAGAAGAGTAAGAAGAAATATAAGAGCCACCATGATGG |
| | AAGGCATCAGCAACTTCAAGACCCCAAGCAAGCTGAGCGAGAAGAAGAA |
| | GGGCTCCGGCGTGAAGCAGACCTTGAACTTCGACCTGCTCAAACTTGCCG |
| | GCGACGTGGAGAGCAACCCCGGCCCCATGGAGGGGATCAGTAACTTCAA |
| | GACCCCCAGCAAGCTGAGCGAGAAGAAGAAGGGTAGCGGCGTGAAACAG |
| | ACCCTGAATTTCGATCTGCTGAAGCTGGCCGGCGACGTGGAGAGCAACCC |
| | CGGCCCCATGGAGGGCATAAGCAATTTCAAGACCCCCAGCAAGCTGAGC |
| | GAAAAGAAAAAGGGCAAGCCCATTCCCAACCCCCTTCTGGGCCTTGACAG |
| | CACCTGATAATAGGCTGGAGCCTCGGTGGCCATGCTTCTTGCCCCTTGGGC |
| | CTCCCCCCAGCCCCTCCTCCCCTTCCTGCACCCGTACCCCCGTGGTCTTTG |
| | AATAAAGTCTGAGTGGGCGGC |
| | (TandemPep.TOPK (5′ UTR, ORF, 3′ UTR)) |
| 374 | ATGATGGAAGGAATCAGCAACTTCAAGACCCCATCCAAGCTGTCCGAGAA |
| | GAAAAAGGGTTCCGGAGTGAAGCAGACCCTGAACTTCGATCTGCTCAAGC |
| | TCGCCGGGGACGTGGAAAGCAACCCTGGTCCCATGGAGGGCATCTCGAAC |
| | TTTAAGACCCCCTCGAAGCTTTCGGAGAAGAAGAAGGGATCCGGCGTCAA |
| | GCAGACTCTGAATTTCGACTTGCTGAAGCTCGCGGGCGATGTGGAATCAA |
| | ACCCGGGGCCTATGGAAGGCATCTCCAACTTCAAAACTCCGTCCAAGCTG |
| | AGCGAGAAAAAGAAGGGAAAGCCCATTCCGAACCCTCTGCTGGGACTGG |
| | ACAGCACC (TandemPep.TOPK codon optimized (ORF)) |
| 375 | ATGATGGAAGGCATCAGCAACTTCAAGACCCCAAGCAAGCTGAGCGAGA |
| | AGAAGAAGGGCTCCGGCGTGAAGCAGACCTTGAACTTCGACCTGCTCAAA |
| | CTTGCCGGCGACGTGGAGAGCAACCCCGGCCCCATGGAGGGGATCAGTA |
| | ACTTCAAGACCCCCAGCAAGCTGAGCGAGAAGAAGAAGGGTAGCGGCGT |
| | GAAACAGACCCTGAATTTCGATCTGCTGAAGCTGGCCGGCGACGTGGAGA |
| | GCAACCCCGGCCCCATGGAGGGCATAAGCAATTTCAAGACCCCCAGCAA |
| | GCTGAGCGAAAAGAAAAAGGGCAAGCCCATTCCCAACCCCCTTCTGGGCC |
| | TTGACAGCACC |
| | (TandemPep.TOPK (ORF)) |
| 376 | MEGISNFKTPSKLSEKKK |
| | (Isolated TOPK inhibitory peptide) |
| 377 | MMEGISNFKTPSKLSEKKKGSGVKQTLNFDLLKLAGDVESNPGPMEGISNFK |
| | TPSKLSEKKKGSGVKQTLNFDLLKLAGDVESNPGPMEGISNFKTPSKLSEKKK |
| | GKPIPNPLLGLDST (TOPK 3-peptide tandem with F2A linker) |
| 378 | MMEGISNFKTPSKLSEKKKGSGATNFSLLKQAGDVEENPGPMEGISNFKTPSK |
| | LSEKKKGSGATNFSLLKQAGDVEENPGPMEGISNFKTPSKLSEKKKGKPIPNP |
| | LLGLDST (TOPK 3-peptide tandem with P2A linker) |
| 379 | TCAAGCTTTTGGACCCTCGTACAGAAGCTAATACGACTCACTATAGGGAA |
| | ATAAGAGAGAAAAGAAGAGTAAGAAGAAATATAAGAGCCACCATGATGA |
| | GCAGACGTAAGCAGGCTAAGCCCCAGCATATCGGCAGCGGCGTGAAGCA |
| | GACCCTGAACTTCGACCTGCTCAAGCTGGCCGGCGATGTCGAGTCAAACC |
| | CCGGCCCCATGAGCAGAAGAAAGCAGGCCAAGCCCCAGCACATCGGTAG |
| | CGGAGTGAAACAGACCCTGAACTTCGACTTACTGAAGCTCGCTGGCGACG |
| | TGGAGAGCAACCCCGGCCCCATGAGCAGAAGAAAGCAGGCCAAGCCCCA |
| | GCACATCGGAAAGCCCATCCCCAACCCCCTGCTGGGCCTGGACAGCACCT |
| | GATAATAGGCTGGAGCCTCGGTGGCCATGCTTCTTGCCCCTTGGGCCTCCC |
| | CCCAGCCCCTCCTCCCCTTCCTGCACCCGTACCCCCGTGGTCTTTGAATAA |
| | AGTCTGAGTGGGCGGC (TandemPep.Sall4, (5′ UTR, ORF, 3′ UTR)) |
| 380 | TCAAGCTTTTGGACCCTCGTACAGAAGCTAATACGACTCACTATAGGGAA |
| | ATAAGAGAGAAAAGAAGAGTAAGAAGAAATATAAGAGCCACCATGATGA |
| | GCCGCAGAAAGCAGGCCAAGCCTCAGCATATCGGATCCGGCGTGAAGCA |
| | GACCCTGAACTTCGACCTTCTGAAGCTGGCCGGCGATGTGGAATCCAACC |
| | CGGGGCCCATGTCCCGGAGGAAACAAGCGAAGCCACAGCACATCGGATC |
| | GGGAGTGAAGCAAACTCTCAACTTCGACTTGCTGAAACTCGCCGGGGATG |
| | TCGAGTCAAATCCCGGCCCTATGAGCCGCCGGAAGCAGGCTAAGCCGCAG |
| | CACATTGGAAAGCCTATCCCCAACCCGCTGCTGGGTCTGGACAGCACCTG |
| | ATAATAGGCTGGAGCCTCGGTGGCCATGCTTCTTGCCCCTTGGGCCTCCCC |
| | CCAGCCCCTCCTCCCCTTCCTGCACCCGTACCCCCGTGGTCTTTGAATAAA |
| | GTCTGAGTGGGCGGC |
| | (TandemPep.Sall4 codon optimized,(5′ UTR, ORF, 3′ UTR)) |
| 381 | ATGATGAGCAGACGTAAGCAGGCTAAGCCCCAGCATATCGGCAGCGGCG |
| | TGAAGCAGACCCTGAACTTCGACCTGCTCAAGCTGGCCGGCGATGTCGAG |
| | TCAAACCCCGGCCCCATGAGCAGAAGAAAGCAGGCCAAGCCCCAGCACA |
| | TCGGTAGCGGAGTGAAACAGACCCTGAACTTCGACTTACTGAAGCTCGCT |
| | GGCGACGTGGAGAGCAACCCCGGCCCCATGAGCAGAAGAAAGCAGGCCA |
| | AGCCCCAGCACATCGGAAAGCCCATCCCCAACCCCCTGCTGGGCCTGGAC |
| | AGCACC (TandemPep.Sall4, (ORF)) |
| 382 | ATGATGAGCCGCAGAAAGCAGGCCAAGCCTCAGCATATCGGATCCGGCG |
| | TGAAGCAGACCCTGAACTTCGACCTTCTGAAGCTGGCCGGCGATGTGGAA |
| | TCCAACCCGGGGCCCATGTCCCGGAGGAAACAAGCGAAGCCACAGCACA |
| | TCGGATCGGGAGTGAAGCAAACTCTCAACTTCGACTTGCTGAAACTCGCC |
| | GGGGATGTCGAGTCAAATCCCGGCCCTATGAGCCGCCGGAAGCAGGCTA |
| | AGCCGCAGCACATTGGAAAGCCTATCCCCAACCCGCTGCTGGGTCTGGAC |
| | AGCACC (TandemPep.Sall4 codon optimized,(ORF,)) |
| 383 | MSRRKQAKPQHI (isolated SALL4-inhibitory peptide) |
| 384 | MMSRRKQAKPQHIGSGVKQTLNFDLLKLAGDVESNPGPMSRRKQAKPQHIG |
| | SGVKQTLNFDLLKLAGDVESNPGPMSRRKQAKPQHIGKPIPNPLLGLDST |
| | (SALL4-inhibitory 3-peptide tandem with F2A linker) |
| 385 | MMSRRKQAKPQHIGSGATNFSLLKQAGDVEENPGPMSRRKQAKPQHIGSGA |
| | TNFSLLKQAGDVEENPGPMSRRKQAKPQHIGKPIPNPLLGLDST |
| | (SALL4-inhibitory 3-peptide tandem with P2A linker) |
| 386 | HYPWFKARLYPL (Ras inhibitory peptide) |
| 387 | MHYPWFKARLYPLGSGVKQTLNFDLLKLAGDVESNPGPHYPWFKARLYPLG |
| | SGVKQTLNFDLLKLAGDVESNPGPHYPWFKARLYPLGKPIPNPLLGLDST (Ras |
| | inhibitory peptide tandem-(3x) (GSG)F2A linker-V5 Tag (optional)) |
| 388 | MHYPWFKARLYPLGSGATNFSLLKQAGDVEENPGPHYPWFKARLYPLGSGA |
| | TNFSLIKQAGDVEENPG PHYPWFKARLYPLGKPIPNPLLGLDST |
| | (Ras inhibitory peptide tandem-(3x) (GSG) P2A linker-V5 |
| | Tag (optional)) |
| 389 | TCAAGCTTTTGGACCCTCGTACAGAAGCTAATACGACTCACTATAGGGAA |
| | ATAAGAGAGAAAAGAAGAGTAAGAAGAAATATAAGAGCCACCATGCACT |
| | ACCCCTGGTTCAAGGCCAGACTGTACCCCCTGGGCAGCGGCGTGAAGCAG |
| | ACCCTGAACTTCGACCTCCTGAAGCTGGCCGGCGATGTGGAGAGCAATCC |
| | CGGCCCCCACTACCCCTGGTTCAAGGCCAGACTGTACCCCCTGGGCAGCG |
| | GAGTGAAGCAAACCCTAAACTTTGACCTGCTGAAGCTGGCCGGCGACGTG |
| | GAAAGCAACCCCGGACCCCACTACCCCTGGTTTAAGGCCCGCCTGTACCC |
| | CCTGGGCAAGCCCATCCCCAATCCCCTGCTGGGCCTGGACAGCACCTGAT |
| | AATAGGCTGGAGCCTCGGTGGCCATGCTTCTTGCCCCTTGGGCCTCCCCCC |
| | AGCCCCTCCTCCCCTTCCTGCACCCGTACCCCCGTGGTCTTTGAATAAAGT |
| | CTGAGTGGGCGGC (Ras inhibitory peptide tandem-(3x)) |
| 390 | ATGCACTACCCCTGGTTCAAGGCCAGACTGTACCCCCTGGGCAGCGGCGT |
| | GAAGCAGACCCTGAACTTCGACCTCCTGAAGCTGGCCGGCGATGTGGAGA |
| | GCAATCCCGGCCCCCACTACCCCTGGTTCAAGGCCAGACTGTACCCCCTG |
| | GGCAGCGGAGTGAAGCAAACCCTAAACTTTGACCTGCTGAAGCTGGCCGG |
| | CGACGTGGAAAGCAACCCCGGACCCCACTACCCCTGGTTTAAGGCCCGCC |
| | TGTACCCCCTGGGCAAGCCCATCCCCAATCCCCTGCTGGGCCTGGACAGC |
| | ACC (Ras inhibitory peptide tandem-(3x) ORF) |
| 391 | TCAAGCTTTTGGACCCTCGTACAGAAGCTAATACGACTCACTATAGGGAA |
| | ATAAGAGAGAAAAGAAGAGTAAGAAGAAATATAAGAGCCACCATGCATT |
| | ACCCGTGGTTTAAGGCCCGCCTGTATCCACTGGGATCCGGGGTCAAGCAG |
| | ACCCTTAACTTCGACCTCCTGAAGCTGGCCGGAGATGTGGAAAGCAACCC |
| | GGGTCCCCACTACCCCTGGTTCAAAGCGCGGCTGTACCCCCTGGGATCGG |
| | GCGTGAAGCAGACTCTCAACTTCGACTTGCTTAAGCTGGCTGGGGACGTG |
| | GAGTCCAATCCTGGCCCACACTACCCTTGGTTCAAGGCCCGGCTCTACCCT |
| | CTCGGAAAGCCGATCCCGAACCCCCTGCTGGGCCTGGATAGCACCTGATA |
| | ATAGGCTGGAGCCTCGGTGGCCATGCTTCTTGCCCCTTGGGCCTCCCCCCA |
| | GCCCCTCCTCCCCTTCCTGCACCCGTACCCCCGTGGTCTTTGAATAAAGTC |
| | TGAGTGGGCGGC |
| | (Ras inhibitory peptide tandem-(3x) codon optimized) |
| 392 | ATGCATTACCCGTGGTTTAAGGCCCGCCTGTATCCACTGGGATCCGGGGT |
| | CAAGCAGACCCTTAACTTCGACCTCCTGAAGCTGGCCGGAGATGTGGAAA |
| | GCAACCCGGGTCCCCACTACCCCTGGTTCAAAGCGCGGCTGTACCCCCTG |
| | GGATCGGGCGTGAAGCAGACTCTCAACTTCGACTTGCTTAAGCTGGCTGG |
| | GGACGTGGAGTCCAATCCTGGCCCACACTACCCTTGGTTCAAGGCCCGGC |
| | TCTACCCTCTCGGAAAGCCGATCCCGAACCCCCTGCTGGGCCTGGATAGC |
| | ACC |
| | (Ras inhibitory peptide tandem-(3x) codon optimized ORF) |
| 393 | METFSDLWKLLPEGSGVKQTLNFDLLKLAGDVESNPGPETFSDLWKLLPEGS |
| | GVKQTLNFDLLKLAGDVESNPGPETFSDLWKLLPEGKPIPNPLLGLDST |
| | (TandemPep.P53 ORF) |
| 394 | MLTFEHSWAQLTSGSGVKQTLNFDLLKLAGDVESNPGPLTFEHSWAQLTSGS |
| | GVKQTLNFDLLKLAGDVESNPGPLTFEHSWAQLTSGKPIPNPLLGLDST |
| | (TandemPep.p53.6S ORF) |
| 395 | METFEHWWAQLTSGSGVKQTLNFDLLKLAGDVESNPGPETFEHWWAQLTS |
| | GSGVKQTLNFDLLKLAGDVESNPGPETFEHWWAQLTSGKPIPNPLLGLDST |
| | (TandemPep.p53.P1E6W ORF) |
| 396 | MLTFEHWWAQLTSGSGVKQTLNFDLLKLAGDVESNPGPLTFEHWWAQLTS |
| | GSGVKQTLNFDLLKLAGDVESNPGPLTFEHWWAQLTSGKPIPNPLLGLDST |
| | (TandemPep.p53.P6W ORF) |
| 397 | METFEHWWSQLLSGSGVKQTLNFDLLKLAGDVESNPGPETFEHWWSQLLSG |
| | SGVKQTLNFDLLKLAGDVESNPGPETFEHWWSQLLSGKPIPNPLLGLDST |
| | (TandemPep.p53.pDIQ ORF) |
| 398 | MTSFAEYWNLLSPGSGVKQTLNFDLLKLAGDVESNPGPTSFAEYWNLLSPGS |
| | GVKQTLNFDLLKLAGDVESNPGPTSFAEYWNLLSPGKPIPNPLLGLDST |
| | (TandemPep.p53.pMI ORF) |
| 399 | TSFAEYWNLLSP (pMI) |
| 400 | ETFSDLWKLLPE (p53) |
| 401 | ETFEHWWSQLLS (pDIQ) |
| 402 | ETFEHWWAQLTS (p1E6W) |
| 403 | LTFEHSWAQLTS (p536S) |
| 404 | LTFEHWWAQLTS (P6W) |
| 405 | TCAAGCTTTTGGACCCTCGTACAGAAGCTAATACGACTCACTATAGGGAA |
| | ATAAGAGAGAAAAGAAGAGTAAGAAGAAATATAAGAGCCACCATGGAG |
| | ACCTTTAGCGACCTGTGGAAGTTGCTGCCCGAGGGCAGCGGCGTGAAGCA |
| | GACCCTGAACTTCGATCTGCTGAAGTTAGCCGGGGACGTGGAGAGCAACC |
| | CCGGCCCCGAGACATTCTCAGACCTCTGGAAGCTGCTGCCCGAGGGCTCT |
| | GGCGTGAAGCAGACCCTGAACTTCGATTTACTGAAGCTGGCCGGCGACGT |
| | CGAGAGCAACCCCGGCCCCGAAACCTTCAGCGACCTGTGGAAGCTGCTGC |
| | CTGAGGGCAAGCCCATCCCCAACCCCCTGCTGGGCCTGGACAGCACCTGA |
| | TAATAGGCTGGAGCCTCGGTGGCCATGCTTCTTGCCCCTTGGGCCTCCCCC |
| | CAGCCCCTCCTCCCCTTCCTGCACCCGTACCCCCGTGGTCTTTGAATAAAG |
| | TCTGAGTGGGCGGC (TandemPep.P53 (5′UTR, ORF, 3′UTR) |
| 406 | ATGGAGACCTTTAGCGACCTGTGGAAGTTGCTGCCCGAGGGCAGCGGCGT |
| | GAAGCAGACCCTGAACTTCGATCTGCTGAAGTTAGCCGGGGACGTGGAGA |
| | GCAACCCCGGCCCCGAGACATTCTCAGACCTCTGGAAGCTGCTGCCCGAG |
| | GGCTCTGGCGTGAAGCAGACCCTGAACTTCGATTTACTGAAGCTGGCCGG |
| | CGACGTCGAGAGCAACCCCGGCCCCGAAACCTTCAGCGACCTGTGGAAGC |
| | TGCTGCCTGAGGGCAAGCCCATCCCCAACCCCCTGCTGGGCCTGGACAGC |
| | ACC (TandemPep.P53 ORF) |
| 407 | TCAAGCTTTTGGACCCTCGTACAGAAGCTAATACGACTCACTATAGGGAA |
| | ATAAGAGAGAAAAGAAGAGTAAGAAGAAATATAAGAGCCACCATGCTGA |
| | CCTTCGAGCACAGCTGGGCTCAGCTGACCAGCGGCAGCGGCGTTAAGCAA |
| | ACCCTGAACTTCGATTTGCTGAAGCTCGCCGGCGACGTGGAAAGCAACCC |
| | TGGCCCCCTGACCTTCGAGCATTCTTGGGCTCAGCTGACCAGCGGGTCTG |
| | GCGTGAAGCAGACCCTGAACTTCGACCTGTTAAAGCTGGCCGGAGATGTG |
| | GAGAGCAATCCCGGCCCCCTGACCTTCGAGCACAGTTGGGCCCAGCTGAC |
| | CAGCGGCAAGCCCATCCCCAACCCCCTGTTGGGCCTGGACAGCACCTGAT |
| | AATAGGCTGGAGCCTCGGTGGCCATGCTTCTTGCCCCTTGGGCCTCCCCCC |
| | AGCCCCTCCTCCCCTTCCTGCACCCGTACCCCCGTGGTCTTTGAATAAAGT |
| | CTGAGTGGGCGGC (TandemPep.P53.6S (5′UTR, ORF, 3′UTR) |
| 408 | ATGCTGACCTTCGAGCACAGCTGGGCTCAGCTGACCAGCGGCAGCGGCGT |
| | TAAGCAAACCCTGAACTTCGATTTGCTGAAGCTCGCCGGCGACGTGGAAA |
| | GCAACCCTGGCCCCCTGACCTTCGAGCATTCTTGGGCTCAGCTGACCAGC |
| | GGGTCTGGCGTGAAGCAGACCCTGAACTTCGACCTGTTAAAGCTGGCCGG |
| | AGATGTGGAGAGCAATCCCGGCCCCCTGACCTTCGAGCACAGTTGGGCCC |
| | AGCTGACCAGCGGCAAGCCCATCCCCAACCCCCTGTTGGGCCTGGACAGC |
| | ACC (TandemPep.P53.6S ORF) |
| 409 | TCAAGCTTTTGGACCCTCGTACAGAAGCTAATACGACTCACTATAGGGAA |
| | ATAAGAGAGAAAAGAAGAGTAAGAAGAAATATAAGAGCCACCATGGAG |
| | ACCTTCGAGCACTGGTGGGCGCAACTGACCAGCGGCAGCGGCGTGAAGC |
| | AGACCCTGAACTTCGATCTGCTGAAGTTAGCCGGCGACGTGGAGTCAAAC |
| | CCCGGCCCCGAGACCTTCGAGCACTGGTGGGCCCAGCTGACCTCTGGCAG |
| | CGGCGTCAAGCAAACCCTGAACTTCGACCTTCTGAAGCTGGCCGGCGATG |
| | TGGAGAGCAACCCCGGCCCCGAGACCTTCGAGCACTGGTGGGCCCAGCTC |
| | ACCTCGGGCAAGCCCATCCCCAACCCCCTGCTGGGTCTGGACAGCACCTG |
| | ATAATAGGCTGGAGCCTCGGTGGCCATGCTTCTTGCCCCTTGGGCCTCCCC |
| | CCAGCCCCTCCTCCCCTTCCTGCACCCGTACCCCCGTGGTCTTTGAATAAA |
| | GTCTGAGTGGGCGGC (Tandem.Pep.P53.P1.E6W (5′UTR, ORF, 3′UTR) |
| 410 | ATGGAGACCTTCGAGCACTGGTGGGCGCAACTGACCAGCGGCAGCGGCG |
| | TGAAGCAGACCCTGAACTTCGATCTGCTGAAGTTAGCCGGCGACGTGGAG |
| | TCAAACCCCGGCCCCGAGACCTTCGAGCACTGGTGGGCCCAGCTGACCTC |
| | TGGCAGCGGCGTCAAGCAAACCCTGAACTTCGACCTTCTGAAGCTGGCCG |
| | GCGATGTGGAGAGCAACCCCGGCCCCGAGACCTTCGAGCACTGGTGGGCC |
| | CAGCTCACCTCGGGCAAGCCCATCCCCAACCCCCTGCTGGGTCTGGACAG |
| | CACC (Tandem.Pep.P53.P1.E6W ORF) |
| 411 | TCAAGCTTTTGGACCCTCGTACAGAAGCTAATACGACTCACTATAGGGAA |
| | ATAAGAGAGAAAAGAAGAGTAAGAAGAAATATAAGAGCCACCATGGAA |
| | ACCTTCGAGCATTGGTGGGCACAGCTGACCAGCGGATCAGGAGTGAAAC |
| | AGACTCTCAACTTCGATCTGCTGAAGCTTGCCGGGGACGTGGAGTCCAAC |
| | CCTGGCCCTGAAACTTTCGAACATTGGTGGGCTCAGCTCACCTCCGGCTCG |
| | GGAGTCAAGCAGACTCTGAACTTCGACCTCCTGAAGTTGGCCGGCGATGT |
| | GGAGAGCAACCCCGGTCCCGAAACCTTTGAGCACTGGTGGGCGCAACTGA |
| | CCTCCGGAAAGCCGATCCCAAATCCGCTGCTGGGGCTGGACAGCACCTGA |
| | TAATAGGCTGGAGCCTCGGTGGCCATGCTTCTTGCCCCTTGGGCCTCCCCC |
| | CAGCCCCTCCTCCCCTTCCTGCACCCGTACCCCCGTGGTCTTTGAATAAAG |
| | TCTGAGTGGGCGGC |
| | (TandemPep.p53.P1E6W_DNA2.0 (5′UTR, ORF, 3′UTR) |
| 412 | ATGGAAACCTTCGAGCATTGGTGGGCACAGCTGACCAGCGGATCAGGAGT |
| | GAAACAGACTCTCAACTTCGATCTGCTGAAGCTTGCCGGGGACGTGGAGT |
| | CCAACCCTGGCCCTGAAACTTTCGAACATTGGTGGGCTCAGCTCACCTCC |
| | GGCTCGGGAGTCAAGCAGACTCTGAACTTCGACCTCCTGAAGTTGGCCGG |
| | CGATGTGGAGAGCAACCCCGGTCCCGAAACCTTTGAGCACTGGTGGGCGC |
| | AACTGACCTCCGGAAAGCCGATCCCAAATCCGCTGCTGGGGCTGGACAGC |
| | ACC (TandemPep.p53.P1E6W_DNA2.0 ORF) |
| 413 | TCAAGCTTTTGGACCCTCGTACAGAAGCTAATACGACTCACTATAGGGAA |
| | ATAAGAGAGAAAAGAAGAGTAAGAAGAAATATAAGAGCCACCATGCTGA |
| | CCTTTGAGCACTGGTGGGCCCAGCTGACCAGCGGCAGCGGCGTGAAACAG |
| | ACCCTGAACTTCGACCTGCTGAAACTGGCCGGCGACGTGGAGTCTAACCC |
| | CGGGCCCCTGACCTTCGAGCACTGGTGGGCCCAGCTGACCAGCGGAAGCG |
| | GAGTGAAGCAGACGCTAAACTTCGACCTCCTGAAGCTGGCCGGCGATGTG |
| | GAGAGCAACCCCGGACCCCTGACCTTCGAGCACTGGTGGGCCCAGCTGAC |
| | TAGCGGCAAGCCCATCCCCAATCCCCTGCTGGGCCTGGACAGCACCTGAT |
| | AATAGGCTGGAGCCTCGGTGGCCATGCTTCTTGCCCCTTGGGCCTCCCCCC |
| | AGCCCCTCCTCCCCTTCCTGCACCCGTACCCCCGTGGTCTTTGAATAAAGT |
| | CTGAGTGGGCGGC |
| | (TandemPep.P53.P6W (5′UTR, ORF, 3′UTR) |
| 414 | ATGCTGACCTTTGAGCACTGGTGGGCCCAGCTGACCAGCGGCAGCGGCGT |
| | GAAACAGACCCTGAACTTCGACCTGCTGAAACTGGCCGGCGACGTGGAGT |
| | CTAACCCCGGGCCCCTGACCTTCGAGCACTGGTGGGCCCAGCTGACCAGC |
| | GGAAGCGGAGTGAAGCAGACGCTAAACTTCGACCTCCTGAAGCTGGCCG |
| | GCGATGTGGAGAGCAACCCCGGACCCCTGACCTTCGAGCACTGGTGGGCC |
| | CAGCTGACTAGCGGCAAGCCCATCCCCAATCCCCTGCTGGGCCTGGACAG |
| | CACC (TandemPep.P53.P6W ORF) |
| 415 | TCAAGCTTTTGGACCCTCGTACAGAAGCTAATACGACTCACTATAGGGAA |
| | ATAAGAGAGAAAAGAAGAGTAAGAAGAAATATAAGAGCCACCATGCTCA |
| | CCTTCGAACACTGGTGGGCGCAGCTGACCTCAGGCTCCGGAGTGAAGCAG |
| | ACCCTGAACTTCGATCTGCTCAAGCTGGCTGGCGATGTGGAAAGCAACCC |
| | GGGGCCCCTCACTTTCGAGCATTGGTGGGCCCAGTTGACTTCGGGCTCCG |
| | GTGTCAAGCAAACCCTCAATTTCGACCTTCTGAAGCTGGCCGGGGACGTG |
| | GAGAGCAACCCAGGACCTCTGACCTTTGAACATTGGTGGGCACAGCTGAC |
| | TTCCGGAAAACCCATCCCGAACCCTCTGCTGGGACTGGACAGCACCTGAT |
| | AATAGGCTGGAGCCTCGGTGGCCATGCTTCTTGCCCCTTGGGCCTCCCCCC |
| | AGCCCCTCCTCCCCTTCCTGCACCCGTACCCCCGTGGTCTTTGAATAAAGT |
| | CTGAGTGGGCGGC |
| | (TandemPep.p53.P6W_DNA2.0 (5′UTR, ORF, 3′UTR) |
| 416 | ATGCTCACCTTCGAACACTGGTGGGCGCAGCTGACCTCAGGCTCCGGAGT |
| | GAAGCAGACCCTGAACTTCGATCTGCTCAAGCTGGCTGGCGATGTGGAAA |
| | GCAACCCGGGGCCCCTCACTTTCGAGCATTGGTGGGCCCAGTTGACTTCG |
| | GGCTCCGGTGTCAAGCAAACCCTCAATTTCGACCTTCTGAAGCTGGCCGG |
| | GGACGTGGAGAGCAACCCAGGACCTCTGACCTTTGAACATTGGTGGGCAC |
| | AGCTGACTTCCGGAAAACCCATCCCGAACCCTCTGCTGGGACTGGACAGC |
| | ACC (TandemPep.p53.P6W_DNA2.0 ORF) |
| 417 | TCAAGCTTTTGGACCCTCGTACAGAAGCTAATACGACTCACTATAGGGAA |
| | ATAAGAGAGAAAAGAAGAGTAAGAAGAAATATAAGAGCCACCATGGAG |
| | ACCTTCGAGCACTGGTGGAGCCAGCTGCTTAGCGGAAGCGGAGTGAAAC |
| | AAACCTTAAACTTCGACCTGCTGAAGCTGGCCGGCGACGTGGAAAGCAAT |
| | CCCGGCCCCGAGACCTTCGAGCACTGGTGGAGCCAGCTGTTGAGCGGTAG |
| | CGGCGTGAAGCAGACCCTGAACTTCGACCTGCTCAAGCTGGCCGGCGACG |
| | TGGAGAGCAACCCCGGCCCAGAGACCTTCGAGCACTGGTGGAGCCAGCT |
| | GCTGAGCGGCAAGCCCATCCCCAATCCCCTGCTGGGCCTGGACAGCACCT |
| | GATAATAGGCTGGAGCCTCGGTGGCCATGCTTCTTGCCCCTTGGGCCTCCC |
| | CCCAGCCCCTCCTCCCCTTCCTGCACCCGTACCCCCGTGGTCTTTGAATAA |
| | AGTCTGAGTGGGCGGC |
| | (TandemPep.p53.pDIQ (5′UTR, ORF, 3′UTR) |
| 418 | ATGGAGACCTTCGAGCACTGGTGGAGCCAGCTGCTTAGCGGAAGCGGAGT |
| | GAAACAAACCTTAAACTTCGACCTGCTGAAGCTGGCCGGCGACGTGGAAA |
| | GCAATCCCGGCCCCGAGACCTTCGAGCACTGGTGGAGCCAGCTGTTGAGC |
| | GGTAGCGGCGTGAAGCAGACCCTGAACTTCGACCTGCTCAAGCTGGCCGG |
| | CGACGTGGAGAGCAACCCCGGCCCAGAGACCTTCGAGCACTGGTGGAGC |
| | CAGCTGCTGAGCGGCAAGCCCATCCCCAATCCCCTGCTGGGCCTGGACAG |
| | CACC (TandemPep.p53.pDIQ ORF) |
| 419 | TCAAGCTTTTGGACCCTCGTACAGAAGCTAATACGACTCACTATAGGGAA |
| | ATAAGAGAGAAAAGAAGAGTAAGAAGAAATATAAGAGCCACCATGGAA |
| | ACCTTTGAACACTGGTGGAGCCAGCTCCTGTCGGGATCCGGCGTGAAGCA |
| | AACTCTGAATTTCGACCTGTTGAAACTTGCGGGGGACGTCGAGAGCAACC |
| | CGGGTCCTGAAACTTTCGAGCATTGGTGGTCCCAGCTGCTGTCAGGCTCC |
| | GGAGTGAAGCAGACCCTCAACTTCGATCTGCTGAAGCTGGCCGGCGATGT |
| | GGAGTCCAACCCGGGACCCGAAACCTTCGAGCACTGGTGGTCGCAGCTGC |
| | TCTCCGGGAAGCCAATCCCCAACCCTCTGCTCGGACTGGACAGCACCTGA |
| | TAATAGGCTGGAGCCTCGGTGGCCATGCTTCTTGCCCCTTGGGCCTCCCCC |
| | CAGCCCCTCCTCCCCTTCCTGCACCCGTACCCCCGTGGTCTTTGAATAAAG |
| | TCTGAGTGGGCGGC |
| | (TandemPep.p53.pDIQ_DNA2.0 (5′UTR, ORF, 3′UTR) |
| 420 | ATGGAAACCTTTGAACACTGGTGGAGCCAGCTCCTGTCGGGATCCGGCGT |
| | GAAGCAAACTCTGAATTTCGACCTGTTGAAACTTGCGGGGGACGTCGAGA |
| | GCAACCCGGGTCCTGAAACTTTCGAGCATTGGTGGTCCCAGCTGCTGTCA |
| | GGCTCCGGAGTGAAGCAGACCCTCAACTTCGATCTGCTGAAGCTGGCCGG |
| | CGATGTGGAGTCCAACCCGGGACCCGAAACCTTCGAGCACTGGTGGTCGC |
| | AGCTGCTCTCCGGGAAGCCAATCCCCAACCCTCTGCTCGGACTGGACAGC |
| | ACC (TandemPep.p53.pDIQ_DNA2.0 ORF) |
| 421 | TCAAGCTTTTGGACCCTCGTACAGAAGCTAATACGACTCACTATAGGGAA |
| | ATAAGAGAGAAAAGAAGAGTAAGAAGAAATATAAGAGCCACCATGACCT |
| | CCTTCGCCGAGTACTGGAACCTGCTGAGCCCTGGCAGCGGCGTTAAACAG |
| | ACCCTGAATTTCGACCTGCTGAAGCTGGCCGGCGATGTGGAGAGCAACCC |
| | CGGCCCCACCAGCTTCGCTGAATACTGGAACTTGCTGAGCCCCGGCTCAG |
| | GCGTGAAGCAGACCCTGAACTTCGACTTACTGAAACTGGCCGGCGACGTG |
| | GAAAGCAATCCCGGCCCCACCAGCTTCGCAGAGTACTGGAACCTGCTGAG |
| | CCCCGGCAAGCCCATCCCCAACCCCCTGCTCGGCCTGGACAGCACCTGAT |
| | AATAGGCTGGAGCCTCGGTGGCCATGCTTCTTGCCCCTTGGGCCTCCCCCC |
| | AGCCCCTCCTCCCCTTCCTGCACCCGTACCCCCGTGGTCTTTGAATAAAGT |
| | CTGAGTGGGCGGC (TandemPep.p53.pMI (5′UTR, ORF, 3′UTR) |
| 422 | ATGACCTCCTTCGCCGAGTACTGGAACCTGCTGAGCCCTGGCAGCGGCGT |
| | TAAACAGACCCTGAATTTCGACCTGCTGAAGCTGGCCGGCGATGTGGAGA |
| | GCAACCCCGGCCCCACCAGCTTCGCTGAATACTGGAACTTGCTGAGCCCC |
| | GGCTCAGGCGTGAAGCAGACCCTGAACTTCGACTTACTGAAACTGGCCGG |
| | CGACGTGGAAAGCAATCCCGGCCCCACCAGCTTCGCAGAGTACTGGAACC |
| | TGCTGAGCCCCGGCAAGCCCATCCCCAACCCCCTGCTCGGCCTGGACAGC |
| | ACC (TandemPep.p53.pMI ORF) |
| 423 | TCAAGCTTTTGGACCCTCGTACAGAAGCTAATACGACTCACTATAGGGAA |
| | ATAAGAGAGAAAAGAAGAGTAAGAAGAAATATAAGAGCCACCATGACCA |
| | GCTTCGCCGAATACTGGAACCTCTTGTCCCCCGGATCGGGGGTCAAGCAG |
| | ACCCTGAACTTTGATCTCCTGAAGCTGGCCGGGGATGTGGAAAGCAACCC |
| | CGGACCTACTTCCTTCGCCGAGTACTGGAATCTGCTGTCGCCGGGATCCG |
| | GCGTGAAGCAAACTCTGAACTTCGACCTCCTTAAACTTGCGGGCGACGTG |
| | GAGTCCAACCCGGGCCCTACCTCATTCGCTGAATATTGGAACCTCCTGTCC |
| | CCGGGAAAGCCCATCCCTAACCCACTGCTGGGTCTGGACAGCACCTGATA |
| | ATAGGCTGGAGCCTCGGTGGCCATGCTTCTTGCCCCTTGGGCCTCCCCCCA |
| | GCCCCTCCTCCCCTTCCTGCACCCGTACCCCCGTGGTCTTTGAATAAAGTC |
| | TGAGTGGGCGGC (TandemPep.p53.pMI_DNA2.0 (5′UTR, ORF, 3′UTR) |
| 424 | ATGACCAGCTTCGCCGAATACTGGAACCTCTTGTCCCCCGGATCGGGGGT |
| | CAAGCAGACCCTGAACTTTGATCTCCTGAAGCTGGCCGGGGATGTGGAAA |
| | GCAACCCCGGACCTACTTCCTTCGCCGAGTACTGGAATCTGCTGTCGCCG |
| | GGATCCGGCGTGAAGCAAACTCTGAACTTCGACCTCCTTAAACTTGCGGG |
| | CGACGTGGAGTCCAACCCGGGCCCTACCTCATTCGCTGAATATTGGAACC |
| | TCCTGTCCCCGGGAAAGCCCATCCCTAACCCACTGCTGGGTCTGGACAGC |
| | ACC ((TandemPep.p53.pMI_DNA2.0 ORF) |
| 425 | MTPDYFLGSGVKQTLNFDLLKLAGDVESNPGPTPDYFLGSGVKQTLNFDLLK |
| | LAGDVESNPGPTPDYFLGKPIPNPLLGLDST |
| | (TandemPep.PP2aB56alpha, ORF) |
| 426 | MVKKKKIKREIKIFRGRSRFRGRSRGSGVKQTLNFDLLLAGDVESNPGPVKK |
| | KKIKREIKIFRGRSRFRGRSRGSGVKQTLNFDLLKLAGDVESNPGPVKKKKIK |
| | REIKIFRGRSRFRGRSRGKPIPNPLLGLDST |
| | (TandemPep.PP2aDP7, ORF) |
| 427 | RQKRLIRQKRLIRQKRLIGSGVKQTLNFDLLKLAGDVESNPGPRQKRLIRQKR |
| | LIRQKRLIGSGVKQTLNFDLLKLAGDVESNPGPRQKRLIRQKRLIRQKRLIGKP |
| | IPNPLLGLDST |
| | (TandemPep.PP2aDPT2) |
| 428 | MVKKKKIKREIKIPRRPGPTRKHYQPYAGSGVKQTLNFDLLKLAGDVESNPG |
| | PVKKKKIKREIKIPRRPGPTRKHYQPYAGSGVKQTLNFDLLKLAGDVESNPGP |
| | VKKKKIKREIKIPRRPGPTRKHYQPYAGKPIPNPLLGLDST |
| | (TandemPep.PP2aDPT5) |
| 429 | TPDYFL (PP2aB56alpha ) |
| 430 | VKKKKIKREIKIFRGRSRFRGRSR (PP2aDP7) |
| 431 | RQKRLIRQKRLIRQKRLI (PP2aDPT2) |
| 432 | VKKKKIKREIKIPRRPGPTRKHYQPYA (PP2aDPT5) |
| 433 | TCAAGCTTTTGGACCCTCGTACAGAAGCTAATACGACTCACTATAGGGAA |
| | ATAAGAGAGAAAAGAAGAGTAAGAAGAAATATAAGAGCCACCATGACCC |
| | CCGACTACTTCCTGGGCAGCGGCGTTAAGCAGACCCTGAACTTTGACCTA |
| | CTGAAGCTGGCCGGCGATGTGGAGTCTAACCCCGGCCCCACCCCCGACTA |
| | CTTCCTGGGCTCCGGCGTGAAGCAGACCCTGAATTTCGACCTGCTAAAGC |
| | TGGCCGGCGACGTGGAGAGCAACCCCGGCCCCACCCCCGACTACTTTCTG |
| | GGCAAGCCCATCCCCAACCCCCTGCTGGGCCTGGACAGCACCTGATAATA |
| | GGCTGGAGCCTCGGTGGCCATGCTTCTTGCCCCTTGGGCCTCCCCCCAGCC |
| | CCTCCTCCCCTTCCTGCACCCGTACCCCCGTGGTCTTTGAATAAAGTCTGA |
| | GTGGGCGGC |
| | (TandemPep.PP2aB56alpha (5′ UTR, ORF, 3′ UTR) |
| 434 | ATGACCCCCGACTACTTCCTGGGCAGCGGCGTTAAGCAGACCCTGAACTT |
| | TGACCTACTGAAGCTGGCCGGCGATGTGGAGTCTAACCCCGGCCCCACCC |
| | CCGACTACTTCCTGGGCTCCGGCGTGAAGCAGACCCTGAATTTCGACCTG |
| | CTAAAGCTGGCCGGCGACGTGGAGAGCAACCCCGGCCCCACCCCCGACTA |
| | CTTTCTGGGCAAGCCCATCCCCAACCCCCTGCTGGGCCTGGACAGCACC |
| | (TandemPep.PP2aB56a1ph ORF) |
| 435 | TCAAGCTTTTGGACCCTCGTACAGAAGCTAATACGACTCACTATAGGGAA |
| | ATAAGAGAGAAAAGAAGAGTAAGAAGAAATATAAGAGCCACCATGGTGA |
| | AGAAGAAGAAGATCAAGCGGGAGATCAAGATCTTCAGAGGAAGAAGCCG |
| | GTTCAGAGGGAGAAGCAGAGGCAGCGGCGTGAAGCAGACGCTGAATTTT |
| | GACCTGTTGAAGCTGGCAGGAGACGTGGAGTCCAACCCCGGTCCCGTGAA |
| | GAAGAAGAAAATCAAAAGAGAAATCAAGATCTTCAGAGGCAGAAGCAGA |
| | TTCAGAGGCAGAAGCAGAGGCAGCGGCGTGAAACAAACCCTAAACTTCG |
| | ACCTGCTGAAGCTCGCCGGCGACGTGGAGAGCAACCCAGGCCCCGTGAA |
| | GAAGAAGAAGATTAAGAGAGAGATCAAGATCTTCAGAGGCCGCAGCAGA |
| | TTCAGAGGCAGATCTCGTGGCAAGCCCATCCCAAACCCCCTGCTGGGGCT |
| | CGACAGCACCTGATAATAGGCTGGAGCCTCGGTGGCCATGCTTCTTGCCC |
| | CTTGGGCCTCCCCCCAGCCCCTCCTCCCCTTCCTGCACCCGTACCCCCGTG |
| | GTCTTTGAATAAAGTCTGAGTGGGCGGC |
| | (TandemPep.PP2aDP7 (5′ UTR, ORF, 3′ UTR)) |
| 436 | ATGGTGAAGAAGAAGAAGATCAAGCGGGAGATCAAGATCTTCAGAGGAA |
| | GAAGCCGGTTCAGAGGGAGAAGCAGAGGCAGCGGCGTGAAGCAGACGCT |
| | GAATTTTGACCTGTTGAAGCTGGCAGGAGACGTGGAGTCCAACCCCGGTC |
| | CCGTGAAGAAGAAGAAAATCAAAAGAGAAATCAAGATCTTCAGAGGCAG |
| | AAGCAGATTCAGAGGCAGAAGCAGAGGCAGCGGCGTGAAACAAACCCTA |
| | AACTTCGACCTGCTGAAGCTCGCCGGCGACGTGGAGAGCAACCCAGGCCC |
| | CGTGAAGAAGAAGAAGATTAAGAGAGAGATCAAGATCTTCAGAGGCCGC |
| | AGCAGATTCAGAGGCAGATCTCGTGGCAAGCCCATCCCAAACCCCCTGCT |
| | GGGGCTCGACAGCACC |
| | (TandemPep.PP2aDP7ORF) |
| 437 | TCAAGCTTTTGGACCCTCGTACAGAAGCTAATACGACTCACTATAGGG |
| | AAATAAGAGAGAAAAGAAGAGTAAGAAGAAATATAAGAGCCACCATGA |
| | GACAGAAAAGACTGATTAGACAGAAGAGACTGATCAGACAGAAGAGACT |
| | GATCGGGAGCGGCGTTAAGCAGACCTTAAACTTCGATCTGCTGAAACTGG |
| | CCGGCGACGTGGAGAGTAACCCCGGGCCCAGACAGAAAAGACTCATCAG |
| | GCAGAAGAGACTGATCAGACAGAAGAGACTGATCGGCTCCGGCGTGAAA |
| | CAGACCCTGAATTTCGACCTGCTGAAGCTGGCCGGAGATGTCGAGAGCAA |
| | CCCCGGCCCCAGACAGAAGAGACTGATAAGACAAAAGAGATTGATCAGA |
| | CAGAAGAGACTGATCGGCAAGCCCATCCCCAACCCCCTGCTGGGCCTGGA |
| | CAGCACCTGATAATAGGCTGGAGCCTCGGTGGCCATGCTTCTTGCCCCTTG |
| | GGCCTCCCCCCAGCCCCTCCTCCCCTTCCTGCACCCGTACCCCCGTGGTCT |
| | TTGAATAAAGTCTGAGTGGGCGGC |
| | (TandemPep.PP2aDPT2 (5′ UTR, ORF, 3′ UTR)) |
| 438 | ATGAGACAGAAAAGACTGATTAGACAGAAGAGACTGATCAGACAGAAGA |
| | GACTGATCGGGAGCGGCGTTAAGCAGACCTTAAACTTCGATCTGCTGAAA |
| | CTGGCCGGCGACGTGGAGAGTAACCCCGGGCCCAGACAGAAAAGACTCA |
| | TCAGGCAGAAGAGACTGATCAGACAGAAGAGACTGATCGGCTCCGGCGT |
| | GAAACAGACCCTGAATTTCGACCTGCTGAAGCTGGCCGGAGATGTCGAGA |
| | GCAACCCCGGCCCCAGACAGAAGAGACTGATAAGACAAAAGAGATTGAT |
| | CAGACAGAAGAGACTGATCGGCAAGCCCATCCCCAACCCCCTGCTGGGCC |
| | TGGACAGCACC |
| | (TandemPep.PP2aDPT2 ORF) |
| 439 | TCAAGCTTTTGGACCCTCGTACAGAAGCTAATACGACTCACTATAGGGAA |
| | ATAAGAGAGAAAAGAAGAGTAAGAAGAAATATAAGAGCCACCATGGTCA |
| | AAAAGAAGAAGATCAAAAGAGAGATCAAGATCCCCAGAAGACCCGGGCC |
| | AACAAGGAAACACTACCAGCCCTACGCCGGCAGCGGGGTGAAACAGACC |
| | CTGAACTTCGATCTGCTGAAGTTGGCCGGGGACGTCGAGTCCAATCCCGG |
| | CCCCGTGAAGAAGAAAAAGATCAAGAGGGAGATCAAGATCCCCAGAAGA |
| | CCCGGTCCCACCCGGAAGCACTACCAGCCCTACGCGGGCTCCGGCGTGAA |
| | GCAGACCCTGAATTTCGACCTGCTGAAACTGGCCGGTGACGTGGAGAGCA |
| | ACCCTGGCCCCGTGAAGAAGAAGAAGATTAAGAGAGAGATCAAGATCCC |
| | CAGAAGACCCGGCCCCACCAGAAAGCACTACCAACCCTATGCCGGCAAG |
| | CCCATCCCAAACCCCCTGCTGGGACTGGACAGCACCTGATAATAGGCTGG |
| | AGCCTCGGTGGCCATGCTTCTTGCCCCTTGGGCCTCCCCCCAGCCCCTCCT |
| | CCCCTTCCTGCACCCGTACCCCCGTGGTCTTTGAATAAAGTCTGAGTGGGC |
| | GGC |
| | (TandemPep.PP2aDPT5 (5′ UTR, ORF, 3′ UTR)) |
| 440 | ATGGTCAAAAAGAAGAAGATCAAAAGAGAGATCAAGATCCCCAGAAGAC |
| | CCGGGCCAACAAGGAAACACTACCAGCCCTACGCCGGCAGCGGGGTGAA |
| | ACAGACCCTGAACTTCGATCTGCTGAAGTTGGCCGGGGACGTCGAGTCCA |
| | ATCCCGGCCCCGTGAAGAAGAAAAAGATCAAGAGGGAGATCAAGATCCC |
| | CAGAAGACCCGGTCCCACCCGGAAGCACTACCAGCCCTACGCGGGCTCCG |
| | GCGTGAAGCAGACCCTGAATTTCGACCTGCTGAAACTGGCCGGTGACGTG |
| | GAGAGCAACCCTGGCCCCGTGAAGAAGAAGAAGATTAAGAGAGAGATCA |
| | AGATCCCCAGAAGACCCGGCCCCACCAGAAAGCACTACCAACCCTATGCC |
| | GGCAAGCCCATCCCAAACCCCCTGCTGGGACTGGACAGCACC |
| | (TandemPep.PP2aDPT5 ORF) |
| 441 | TCAAGCTTTTGGACCCTCGTACAGAAGCTAATACGACTCACTATAGGGAA |
| | ATAAGAGAGAAAAGAAGAGTAAGAAGAAATATAAGAGCCACCATGGTCA |
| | AGAAGAAGAAGATCAAGCGGGAGATTAAGATTCCTAGACGCCCCGGACC |
| | CACTAGAAAGCATTACCAGCCTTACGCGGGCTCCGGAGTGAAGCAAACCC |
| | TGAACTTCGACTTGCTGAAGCTGGCCGGGGACGTGGAGTCCAACCCCGGC |
| | CCGGTCAAGAAAAAGAAGATTAAGCGCGAAATCAAAATCCCCCGCCGGC |
| | CGGGGCCTACCCGGAAGCACTACCAGCCATACGCAGGAAGCGGCGTGAA |
| | GCAGACTCTGAATTTCGATCTCCTGAAGCTCGCCGGAGATGTGGAATCGA |
| | ACCCAGGTCCCGTGAAGAAGAAAAAGATCAAGAGGGAGATCAAGATCCC |
| | GAGGCGGCCGGGTCCCACCCGCAAGCACTATCAGCCGTACGCTGGAAAG |
| | CCTATCCCTAACCCGCTTCTGGGCCTGGACTCAACCTGATAATAGGCTGG |
| | AGCCTCGGTGGCCATGCTTCTTGCCCCTTGGGCCTCCCCCCAGCCCCTCCT |
| | CCCCTTCCTGCACCCGTACCCCCGTGGTCTTTGAATAAAGTCTGAGTGGGC |
| | GGC |
| | (TandemPep.PP2aDPT5_codon optimized (5′ UTR, ORF, 3′ UTR)) |
| 442 | ATGGTCAAGAAGAAGAAGATCAAGCGGGAGATTAAGATTCCTAGACGCC |
| | CCGGACCCACTAGAAAGCATTACCAGCCTTACGCGGGCTCCGGAGTGAAG |
| | CAAACCCTGAACTTCGACTTGCTGAAGCTGGCCGGGGACGTGGAGTCCAA |
| | CCCCGGCCCGGTCAAGAAAAAGAAGATTAAGCGCGAAATCAAAATCCCC |
| | CGCCGGCCGGGGCCTACCCGGAAGCACTACCAGCCATACGCAGGAAGCG |
| | GCGTGAAGCAGACTCTGAATTTCGATCTCCTGAAGCTCGCCGGAGATGTG |
| | GAATCGAACCCAGGTCCCGTGAAGAAGAAAAAGATCAAGAGGGAGATCA |
| | AGATCCCGAGGCGGCCGGGTCCCACCCGCAAGCACTATCAGCCGTACGCT |
| | GGAAAGCCTATCCCTAACCCGCTTCTGGGCCTGGACTCAACC |
| | (TandemPep.PP2aDPT5_codon optimized ORF) |
| 443 | MPLTAVFWLIYVLAKALVTVCGSGVKQTLNFDLLKLAGDVESNPGPPLTAVF |
| | WLIYVLAKALVTVCGSGVKQTLNFDLLKLAGDVESNPGPPLTAVFWLIYVLA |
| | KALVTVCGKPIPNPLLGLDST |
| | (TandemPep.STAT3.DBD ORF) |
| 444 | PLTAVFWLIYVLAKALVTVC (STAT3) |
| | TCAAGCTTTTGGACCCTCGTACAGAAGCTAATACGACTCACTATAGGGAA |
| | ATAAGAGAGAAAAGAAGAGTAAGAAGAAATATAAGAGCCACCATGCCCC |
| | TGACCGCCGTGTTCTGGCTGATCTACGTGTTGGCTAAGGCCCTGGTGACCG |
| | TGTGCGGAAGCGGAGTGAAACAGACCTTGAACTTTGACCTGCTGAAGCTG |
| | GCCGGAGACGTGGAAAGCAACCCCGGCCCCCCCCTGACCGCAGTGTTTTG |
| | GCTGATATACGTGCTGGCCAAGGCCCTGGTGACTGTGTGCGGCAGCGGCG |
| | TGAAGCAGACCCTGAACTTCGACCTGCTGAAGCTGGCCGGCGACGTCGAG |
| | AGCAACCCCGGCCCCCCCCTGACCGCCGTGTTCTGGTTGATATATGTGCTG |
| | GCCAAGGCCCTGGTGACAGTGTGCGGCAAGCCCATCCCAAACCCCCTGCT |
| | TGGCCTGGATAGCACCTGATAATAGGCTGGAGCCTCGGTGGCCATGCTTC |
| | TTGCCCCTTGGGCCTCCCCCCAGCCCCTCCTCCCCTTCCTGCACCCGTACC |
| | CCCGTGGTCTTTGAATAAAGTCTGAGTGGGCGGC (TandemPep.STAT3.DBD |
| | (5′ UTR, ORF, 3′ UTR)) |
| 445 | ATGCCCCTGACCGCCGTGTTCTGGCTGATCTACGTGTTGGCTAAGGCCCTG |
| | GTGACCGTGTGCGGAAGCGGAGTGAAACAGACCTTGAACTTTGACCTGCT |
| | GAAGCTGGCCGGAGACGTGGAAAGCAACCCCGGCCCCCCCCTGACCGCA |
| | GTGTTTTGGCTGATATACGTGCTGGCCAAGGCCCTGGTGACTGTGTGCGG |
| | CAGCGGCGTGAAGCAGACCCTGAACTTCGACCTGCTGAAGCTGGCCGGCG |
| | ACGTCGAGAGCAACCCCGGCCCCCCCCTGACCGCCGTGTTCTGGTTGATA |
| | TATGTGCTGGCCAAGGCCCTGGTGACAGTGTGCGGCAAGCCCATCCCAAA |
| | CCCCCTGCTTGGCCTGGATAGCACC (TandemPep.STAT3.DBD ORF) |
| 446 | TCAAGCTTTTGGACCCTCGTACAGAAGCTAATACGACTCACTATAGGGAA |
| | ATAAGAGAGAAAAGAAGAGTAAGAAGAAATATAAGAGCCACCATGCCTC |
| | TGACGGCAGTGTTCTGGTTGATCTACGTGCTCGCCAAAGCCCTTGTGACCG |
| | TGTGTGGATCCGGCGTCAAGCAGACCCTCAATTTCGACTTGCTGAAGCTG |
| | GCCGGGGATGTGGAAAGCAACCCCGGACCCCCACTGACCGCCGTGTTTTG |
| | GCTCATCTACGTCCTGGCTAAGGCGCTCGTGACTGTGTGCGGTTCGGGCGT |
| | GAAGCAGACTCTGAACTTCGATCTGCTCAAGCTTGCCGGGGACGTGGAGT |
| | CCAACCCTGGACCTCCGCTGACCGCGGTGTTCTGGCTGATCTATGTGCTGG |
| | CCAAGGCCCTGGTCACCGTCTGCGGAAAGCCGATTCCCAACCCGCTGCTG |
| | GGCCTGGACAGCACCTGATAATAGGCTGGAGCCTCGGTGGCCATGCTTCT |
| | TGCCCCTTGGGCCTCCCCCCAGCCCCTCCTCCCCTTCCTGCACCCGTACCC |
| | CCGTGGTCTTTGAATAAAGTCTGAGTGGGCGGC |
| | (TandemPep.STAT3.DBD_codon optimized (5′ UTR, ORF, 3′ UTR) |
| 447 | ATGCCTCTGACGGCAGTGTTCTGGTTGATCTACGTGCTCGCCAAAGCCCTT |
| | GTGACCGTGTGTGGATCCGGCGTCAAGCAGACCCTCAATTTCGACTTGCT |
| | GAAGCTGGCCGGGGATGTGGAAAGCAACCCCGGACCCCCACTGACCGCC |
| | GTGTTTTGGCTCATCTACGTCCTGGCTAAGGCGCTCGTGACTGTGTGCGGT |
| | TCGGGCGTGAAGCAGACTCTGAACTTCGATCTGCTCAAGCTTGCCGGGGA |
| | CGTGGAGTCCAACCCTGGACCTCCGCTGACCGCGGTGTTCTGGCTGATCT |
| | ATGTGCTGGCCAAGGCCCTGGTCACCGTCTGCGGAAAGCCGATTCCCAAC |
| | CCGCTGCTGGGCCTGGACAGCACC |
| | (TandemPep.STAT3.DBD_codon optimized ORF) |
| 448 | SVDDHFAKSLGDTWLQIGGSGNPKTANVPQTVPMRLRKLPDSFFKPPE |
| | (Super TDU) |
| 449 | SVDDHFAKSLGDTWLQIGGSGNPKTANVPQTVPARLRKLPDSAFKPPE |
| | (Super TDU (MF2A)) |
| 450 | SVDDAAAKSLGDTWLQIGGSGNPKTANVPQTVPARLRKLPDSAFKPPE |
| | (Super TDU (HFMF4A)) |
| 451 | DPVVEEHFRRSLGKNYKEPEPAPNSVSITGSVDDHFAKALGDTWLQIKAAKD |
| | (Human VGLL4-TDU 1 and 2) |
| 452 | QTLPVASALSSHRTGPPPISPSKRKFSMEPGDEDLDCDNDHVSKMSRIFNPHL |
| | NKTANGDCRRDPRERSRSPIERAVAPTMSLHGSHLYTSLPSLGLEQPLALTKN |
| | SLDASRPAGLSPTLTPGERQQNRPSVITCASAGARNCNLSHCPIAHSGCAAPG |
| | PASYRRPPSAATTCDPVVEEHFRRSLGKNYKEPEPAPNSVSITGSVDDHFAKA |
| | LGDTWLQIKAAKDGASSSPESASRRGQPASPSAHMVSHSHSPSVVS |
| | (Human VGLL4) |
| 453 | MQTLPVASALSSHRTGPPPISPSKRKFSMEPGDEDLDCDNDHVSKMSRIFNPH |
| | LNKTANGDCRRDPRERSRSPIERAVAPTMSLHGSHLYTSLPSLGLEQPLALTK |
| | NSLDASRPAGLSPTLTPGERQQNRPSVITCASAGARNCNLSHCPIAHSGCAAP |
| | GPASYRRPPSAATTCDPVVEEHFRRSLGKNYKEPEPAPNSVSITGSVDDHFAK |
| | ALGDTWLQIKAAKDGASSSPESASRRGQPASPSAHMVSHSHSPSVVS |
| | (Human VGLL4 (complete)) |
| 454 | QTLPVASALSSHRTGPPPISPSKRKFSMEPGDEDLDCDNDHVSKMSRIFNPHL |
| | NKTANGDCRRDPRERSRSPIERAVAPTMSLHGSHLYTSLPSLGLEQPLALTKN |
| | SLDASRPAGLSPTLTPGERQQNRPSVITCASAGARNCNLSHCPIAHSGCAAPG |
| | PASYRRPPSAATTCDPVVEEAARRSLGKNYKEPEPAPNSVSITGSVDDAAAK |
| | ALGDTWLQIKAAKDGASSSPESASRRGQPASPSAHMVSHSHSPSVVS |
| | (Human VGLL4 (HF4A)) |
| 455 | MQTLPVASALSSHRTGPPPISPSKRKFSMEPGDEDLDCDNDHVSKMSRIFNPH |
| | LNKTANGDCRRDPRERSRSPIERAVAPTMSLHGSHLYTSLPSLGLEQPLALTK |
| | NSLDASRPAGLSPTLTPGERQQNRPSVITCASAGARNCNLSHCPIAHSGCAAP |
| | GPASYRRPPSAATTCDPVVEEAARRSLGKNYKEPEPAPNSVSITGSVDDAAA |
| | KALGDTWLQIKAAKDGASSSPESASRRGQPASPSAHMVSHSHSPSVVS |
| | (Human VGLL4 (HF4A) (complete)) |
| 456 | DPVVEEHFRRSLGKNYK (VGLL4 TDU 1 (V1)) |
| 457 | DPVVEEHFRRSLGKNYKE (VGLL4 TDU 1 (V2)) |
| 458 | DPVVEEHFRRSLGKNYKEPE (VGLL4 TDU 1 (V3)) |
| 459 | SVSITGSVDDHFAKALGDTWLQIK (VGLL4 TDU 2 (V1)) |
| 460 | SVSITGSVDDHFAKALGDTWLQIKA (VGLL4 TDU 2 (V2)) |
| 461 | SVSITGSVDDHFAKALGDTWLQIKAAKD (VGLL4 TDU 2 (V3)) |
| 462 | SVDDHFAKSLGDTWLQI (VGL44 Super TDU) |
| 463 | SVDDHFAKSLGDTWLQIGGSGNPKTANVPQTVPMRLRKLPDSFFKPPEM |
| | TYPRRRFRRRRHRPRSHLGQILRRRPWLVHPRHRYRWRRKNGIFNTGKPIPNP |
| | LLGLDST (Super TDU (NLS).cV5 ORF) |
| 464 | SVDDHFAKSLGDTWLQIGGSGNPKTANVPQTVPMRLRKLPDSFFKPPEP |
| | KKKRKVPKKKRKVPKKKRKVGIFNTGKPIPNPLLGLDST (Super TDU |
| | (sv40NLS).cV5 ORF) |
| 465 | SVDDHFAKSLGDTWLQIGGSGNPKTANVPQTVPARLRKLPDSAFKPPEM |
| | TYPRRRFRRRRHRPRSHLGQILRRRPWLVHPRHRYRWRRKNGIFNTGKPIPNP |
| | LLGLDST (MF2A(NLS).cV5 ORF) |
| 466 | VDDHFAKSLGDTWLQIGGSGNPKTANVPQTVPARLRKLPDSAFKPPEPK |
| | KKRKVPKKKRKVPKKKRKVGKPIPNPLLGLDST (MF2A(sv40NLS).cV5 ORF) |
| 467 | SVDDAAAKSLGDTWLQIGGSGNPKTANVPQTVPARLRKLPDSAFKPPEM |
| | TYPRRRFRRRRHRPRSHLGQILRRRPWLVHPRHRYRWRRKNGIFNTGKPIPNP |
| | LLGLDST (HFMF4A(NLS).cV5 ORF) |
| 468 | SVDDAAAKSLGDTWLQIGGSGNPKTANVPQTVPARLRKLPDSAFKPPEP |
| | KKKRKVPKKKRKVPKKKRKVGKPIPNPLLGLDST (HFMF4A(sv40NLS).cV5) |
| 469 | STMGDPVVEEHFRRSLGKNYKEPEPAPNSVSITGSVDDHFAKALGDTWLQ |
| | IKAAKDSAMTYPRRRFRRRRHRPRSHLGQILRRRPWLVHPRHRYRWRRKNG |
| | IFNTGKPIPNPLLGLDST (huVGLL4-TDU1.2(NLS).cV5 ORF) |
| 470 | STMGDPVVEEHFRRSLGKNYKEPEPAPNSVSITGSVDDHFAKALGDTWLQ |
| | IKAAKDSAPKKKRKVPKKKRKVPKKKRKVGKPIPNPLLGLDST (huVGLL4- |
| | TDU1.2(sv40NLS).cV5) |
| 471 | METPLDVLSRAASLVHADDEKREAALRGEPRIQTLPVASALSSHRTGPPPIS |
| | PSKRKFSMEPGDEDLDCDNDHVSKMSRIFNPHLNKTANGDCRRDPRERS |
| | RSPIERAVAPTMSLHGSHLYTSLPSLGLEQPLALTKNSLDASRPAGLSPTL |
| | TPGERQQNRPSVITCASAGARNCNLSHCPIAHSGCAAPGPASYRRPPSAA |
| | TTCDPVVEEHFRRSLGKNYKEPEPAPNSVSITGSVDDHFAKALGDTWLQI |
| | KAAKDGASSSPESASRRGQPASPSAHMVSHSHSPSVVSGKPIPNPLLGLDST |
| | (huVGLL4.cV5 ORF) |
| 472 | METPLDVLSRAASLVHADDEKREAALRGEPRIQTLPVASALSSHRTGPPPIS |
| | PSKRKFSMEPGDEDLDCDNDHVSKMSRIFNPHLNKTANGDCRRDPRERS |
| | RSPIERAVAPTMSLHGSHLYTSLPSLGLEQPLALTKNSLDASRPAGLSPTL |
| | TPGERQQNRPSVITCASAGARNCNLSHCPIAHSGCAAPGPASYRRPPSAA |
| | TTCDPVVEEAARRSLGKNYKEPEPAPNSVSITGSVDDAAAKALGDTWLQI |
| | KAAKDGASSSPESASRRGQPASPSAHMVSHSHSPSVVSGKPIPNPLLGLDST |
| | (huVGLL4(HF4A).cV5 ORF) |
| 473 | MIPRDPVVEEHFRRSLGKNYKEGLSEAKPATPEIQEIVDKVKPQLEEKTNET |
| | YGKLEAVQYKTQVLASTNYYIKVRAGDNKYMHLKVFNGPPGQNADRVLTG |
| | YQVDKNKDDELTGFPKKKRKVPKKKKVPKKKRKVGKPIPNPLLGLDST |
| | (SQT.(nt)VGLL4-TDU1.(sv40NLS).cV5 ORF) |
| 474 | MIPRGLSEAKPATPEIQEIVDKVKPQLEEKTNETYGKLEAVQYKTQVLDPVV |
| | EEHFRRSLGKNYKASTNYYIKVRAGDNKYMHLKVFNGPPGQNADRVLTGY |
| | QVDKNKDDELTGFPKKKRKVPKKKRVPKKKRKVGKPIPNPLLGLDST |
| | (SQT.(L1)VGLL4-TDU1.(sv40NLS).cV5 ORF) |
| 475 | MIPRGLSEAKPATPEIQEIVDKVKPQLEEKTNETYGKLEAVQYKTQVLASTNY |
| | YIKVRAGDNKYMHLKVFNGPDPVVEEHFRRSLGKNYKPGQNADRVLTGY |
| | QVDKNKDDELTGFPKKKRKVPKKKRVPKKKRKVGKPIPNPLLGLDST |
| | (SQT.(L2)VGLL4-TDU1.(sv40NLS).cV5 ORF) |
| 476 | MIPRSVSITGSVDDHFAKALGDTWLQIKGLSEAKPATPEIQEIVDKVKPQLE |
| | EKTNETYGKLEAVQYKTQVLASTNYYIKVRAGDNKYMHLKVFNGPPGQNA |
| | DRVLTGYQVDKNKDDELTGFPKKKRVPKKKRKVPKKKRKVGKPIPNPLLGL |
| | DST (SQT.(nt)VGLL4-TDU2.(sv40NLS).cV5 ORF) |
| 477 | MIPRGLSEAKPATPEIQEIVDKVKPQLEEKTNETYGKLEAVQYKTQVLSVSIT |
| | GSVDDHFAKALGDTWLQIKASTNYYIKVRAGDNKYMHLKVFNGPPGQNA |
| | DRVLTGYQVDKNKDDELTGFPKKKRVPKKKRKVPKKKRKVGKPIPNPLLGL |
| | DST (SQT.(L1)VGLL4-TDU2.(sv40NLS).cV5 ORF) |
| 478 | MIPRGLSEAKPATPEIQEIVDKVKPQLEEKTNETYGKLEAVQYKTQVLASTNY |
| | YIKVRAGDNKYMHLKVFNGPSVSITGSVDDHFAKALGDTWLQIKPGQNAD |
| | RVLTGYQVDKNKDDELTGFPKKKRVPKKKRKVPKKKRKVGKPIPNPLLGLD |
| | ST (SQT.(L2)VGLL4-TDU2.(sv40NLS).cV5 ORF) |
| 479 | STMGDPVVEEHFRRSLGKNYKEPEMTYPRRRFRRRRHRPRSHLGQILRRRP |
| | WLVHPRHRYRWRRKNGIFNTGKPIPNPLLGLDST (huVGLL4-TDU1(NLS).cV5 |
| | ORF) |
| 480 | STMSVSITGSVDDHFAKALGDTWLQIKAAKDSAMTYPRRRFRRRRHRPRS |
| | HLGQILRRRPWLVHPRHRYRWRRKNGIFNTGKPIPNPLLGLDST (huVGLL4- |
| | TDU2(NLS).cV5 ORF) |
| 481 | SVDDHFAKSLGDTWLQIGGSGNPKTANVPQTVPMRLRKLPDSFFKPPEM |
| | TYPRRRFRRRRHRPRSHLGQILRRRPWLVHPRHRYRWRRKNGIFNT |
| | (Super TDU (NLS) ORF amino acid sequence without v5 tag) |
| 482 | SVDDHFAKSLGDTWLQIGGSGNPKTANVPQTVPMRLRKLPDSFFKPPEP |
| | KKKRKVPKKKRKVPKKKRKVGIFNT (Super TDU (sv40NLS) ORF amino acid |
| | sequence without v5 tag) |
| 483 | SVDDHFAKSLGDTWLQIGGSGNPKTANVPQTVPARLRKLPDSAFKPPEM |
| | TYPRRRFRRRRHRPRSHLGQILRRRPWLVHPRHRYRWRRKNGIFNT |
| | (MF2A(NLS) ORF amino acid sequence without v5 tag) |
| 484 | SVDDHFAKSLGDTWLQIGGSGNPKTANVPQTVPARLRKLPDSAFKPPEPK |
| | KKRKVPKKKRKVPKKKRKV (MF2A(sv40NLS) ORF amino acid sequence |
| | without v5 tag) |
| 485 | SVDDAAAKSLGDTWLQIGGSGNPKTANVPQTVPARLRKLPDSAFKPPEM |
| | TYPRRRFRRRRHRPRSHLGQILRRRPWLVHPRHRYRWRRKNGIFNT |
| | (HFMF4A(NLS) ORF amino acid sequence without v5 tag) |
| 486 | SVDDAAAKSLGDTWLQIGGSGNPKTANVPQTVPARLRKLPDSAFKPPEP |
| | KKKRKVPKKKRKVPKKKRKV (HFMF4A(sv40NLS).ORF amino acid sequence |
| | without v5 tag) |
| 487 | STMGDPVVEEHFRRSLGKNYKEPEPAPNSVSITGSVDDHFAKALGDTWL |
| | QIKAAKDSAMTYPRRRFRRRRHRPRSHLGQILRRRPWLVHPRHRYRWRRKN |
| | GIFNT |
| | (huVGLL4-TDU1.2(NLS) ORF amino acid sequence without |
| | v5 tag) |
| 488 | STMGDPVVEEHFRRSLGKNYKEPEPAPNSVSITGSVDDHFAKALGDTWL |
| | QIKAAKDSAPKKKRKVPKKKRKVPKKKRKV |
| | (huVGLL4-TDU1.2(sv40NLS) ORF amino acid sequence without |
| | v5 tag) |
| 489 | METPLDVLSRAASLVHADDEKREAALRGEPRIQTLPVASALSSHRTGPPPIS |
| | PSKRKFSMEPGDEDLDCDNDHVSKMSRIFNPHLNKTANGDCRRDPRERS |
| | RSPIERAVAPTMSLHGSHLYTSLPSLGLEQPLALTKNSLDASRPAGLSPTL |
| | TPGERQQNRPSVITCASAGARNCNLSHCPIAHSGCAAPGPASYRRPPSAA |
| | TTCDPVVEEHFRRSLGKNYKEPEPAPNSVSITGSVDDHFAKALGDTWLQI |
| | KAAKDGASSSPESASRRGQPASPSAHMVSHSHSPSVVS |
| | (huVGLL4 ORF amino acid sequence without v5 tag) |
| 490 | METPLDVLSRAASLVHADDEKREAALRGEPRIQTLPVASALSSHRTGPPPIS |
| | PSKRKFSMEPGDEDLDCDNDHVSKMSRIFNPHLNKTANGDCRRDPRERS |
| | RSPIERAVAPTMSLHGSHLYTSLPSLGLEQPLALTKNSLDASRPAGLSPTL |
| | TPGERQQNRPSVITCASAGARNCNLSHCPIAHSGCAAPGPASYRRPPSAA |
| | TTCDPVVEEAARRSLGKNYKEPEPAPNSVSITGSVDDAAAKALGDTWLQI |
| | KAAKDGASSSPESASRRGQPASPSAHMVSHSHSPSVVS |
| | (huVGLL4(HF4A) ORF amino acid sequence without v5 tag) |
| 491 | MIPRDPVVEEHFRRSLGKNYKEGLSEAKPATPEIQEIVDKVKPQLEEKTNET |
| | YGKLEAVQYKTQVLASTNYYIKVRAGDNKYMHLKVFNGPPGQNADRVLTG |
| | YQVDKNKDDELTGFPKKKRKVPKKKKVPKKKRKV (SQT.(nt)VGLL4- |
| | TDU1.(sv4ONLS) ORF amino acid sequence without v5 tag) |
| 492 | MIPRGLS EAKPATPEIQEIVDKVKPQLEEKTNETYGKLEAVQYKTQVLDPVV |
| | EEHFRRSLGKNYKASTNYYIKVRAGDNKYMHLKVFNGPPGQNADRVLTGY |
| | QVDKNKDDELTGFPKKKRKVPKKKRVPKKKRKV (SQT.(L1)VGLL4- |
| | TDU1.(sv40NLS) ORF amino acid sequence without v5 tag) |
| 493 | MIPRGLSEAKPATPEIQEIVDKVKPQLEEKTNETYGKLEAVQYKTQVLASTNY |
| | YIKVRAGDNKYMHLKVFNGPDPVVEEHFRRSLGKNYKPGQNADRVLTGY |
| | QVDKNKDDELTGFPKKKRKVPKKKRVPKKKRKV (SQT.(L2)VGLL4- |
| | TDU1.(sv40NLS) ORF amino acid sequence without v5 tag) |
| 494 | MIPRSVSITGSVDDHFAKALGDTWLQIKGLSEAKPATPEIQEIVDKVKPQLE |
| | EKTNETYGKLEAVQYKTQVLASTNYYIKVRAGDNKYMHLKVFNGPPGQNA |
| | DRVLTGYQVDKNKDDELTGFPKKKRVPKKKRKVPKKKRKV |
| | (SQT.(nt)VGLL4-TDU2.(sv40NLS) ORF amino acid sequence |
| | without v5 tag) |
| 495 | MIPRGLSEAKPATPEIQEIVDKVKPQLEEKTNETYGKLEAVQYKTQVLSVSIT |
| | GSVDDHFAKALGDTWLQIKASTNYYIKVRAGDNKYMHLKVFNGPPGQNA |
| | DRVLTGYQVDKNKDDELTGFPKKKRVPKKKRKVPKKKRKV |
| | (SQT.(L1)VGLL4-TDU2.(sv40NLS) ORF amino acid sequence |
| | without v5 tag) |
| 496 | MIPRGLSEAKPATPEIQEIVDKVKPQLEEKTNETYGKLEAVQYKTQVLASTNY |
| | YIKVRAGDNKYMHLKVFNGPSVSITGSVDDHFAKALGDTWLQIKPGQNAD |
| | RVLTGYQVDKNKDDELTGFPKKKRVPKKKRKVPKKKRKV |
| | (SQT.(L2)VGLL4-TDU2.(sv40NLS) ORF amino acid sequence |
| | without v5 tag |
| 497 | STMGDPVVEEHFRRSLGKNYKEPEMTYPRRRFRRRRHRPRSHLGQILRRRP |
| | WLVHPRHRYRWRRKNGIFNT (huVGLL4-TDU1(NLS) ORF amino acid |
| | sequence without v5 tag) |
| 498 | STMSVSITGSVDDHFAKALGDTWLQIKAAKDSAMTYPRRRFRRRRHRPRS |
| | HLGQILRRRPWLVHPRHRYRWRRKNGIFNT (huVGLL4-TDU2(NLS) ORF |
| | amino acid sequence without v5 tag) |
| 499 | MSVDDHFAKSLGDTWLQIGSGVKQTLNFDLLKLAGDVESNPGPSVDDHFAK |
| | SLGDTWLQIGSGVKQTLNFDLLKLAGDVESNPGPSVDDHFAKSLGDTWLQI |
| | GKPIPNPLLGLDST (TandemPep.VGLL4.superTDU ORF) |
| 500 | MSVDDHFAKSLGDTWLQIGSGVKQTLNFDLLKLAGDVESNPGPDPVVEEHFR |
| | RSLGKNYKEGSGVKQTLNFDLLKLAGDVESNPGPDPVVEEHFRRSLGKNYKEG |
| | KPIPNPLLGLDST |
| | (TandemPep.VGLL4.TDU1 ORF) |
| 501 | MSVSITGSVDDHFAKALGDTWLQIKGSGVKQTLNFDLLKLAGDVESNPGPSV |
| | SITGSVDDHFAKALGDTWLQIKGSGVKQTLNFDLLKLAGDVESNPGPSVSIT |
| | GSVDDHFAKALGDTWLQIKGKPIPNPLLGLDST (TandemPep.VGLL4.TDU2 |
| | ORF) |
| 502 | MSVDDAAAKSLGDTWLQIGGSGNPKTANVPQTVPARLRKLPDSAFKPPE |
| | GSGVKQTLNFDLLKLAGDVESNPGPSVDDAAAKSLGDTWLQIGGSGNPKTA |
| | NVPQTVPARLRKLPDSAFKPPEGSGVKQTLNFDLLKLAGDVESNPGPSVDDA |
| | AAKSLGDTWLQIGGSGNPKTANVPQTVPARLRKLPDSAFKPPEGKPIPNP |
| | LLGLDST (TandemPep.HFMF4A ORF) |
| 503 | MSVDDHFAKSLGDTWLQIGGSGNPKTANVPQTVPARLRKLPDSAFKPPE |
| | GSGVKQTLNFDLLKLAGDVESNPGPSVDDHFAKSLGDTWLQIGGSGNPKTA |
| | NVPQTVPARLRKLPDSAFKPPEGSGVKQTLNFDLLKLAGDVESNPGPSVDDH |
| | FAKSLGDTWLQIGGSGNPKTANVPQTVPARLRKLPDSAFKPPEGKPIPNPL |
| | LGLDST (TandemPep.MF2A ORF) |
| 504 | MSVDDHFAKSLGDTWLQIGSGVKQTLNFDLLKLAGDVESNPGPSVDDHFAK |
| | SLGDTWLQIGSGVKQTLNFDLLKLAGDVESNPGPSVDDHFAKSLGDTWLQI |
| | (TandemPep.VGLL4.superTDU ORF amino acid sequence |
| | without v5 tag) |
| 505 | MDPVVEEHFRRSLGKNYKEGSGVKQTLNFDLLKLAGDVESNPGPDPVVEEH |
| | FRRSLGKNYKEGSGVKQTLNFDLLKLAGDVESNPGPDPVVEEHFRRSLGKN |
| | YKE |
| | (TandemPep.VGLL4.TDU2 ORF amino acid sequence without |
| | v5 tag) |
| 506 | MSVDDAAAKSLGDTWLQIGGSGNPKTANVPQTVPARLRKLPDSAFKPPE |
| | GSGVKQTLNFDLLKLAGDVESNPGPSVDDAAAKSLGDTWLQIGGSGNPKTA |
| | NVPQTVPARLRKLPDSAFKPPEGSGVKQTLNFDLLKLAGDVESNPGPSVDDA |
| | AAKSLGDTWLQIGGSGNPKTANVPQTVPARLRKLPDSAFKPPE |
| | (TandemPep.HFMF4A ORF amino acid sequence without |
| | v5 tag) |
| 507 | MSVDDHFAKSLGDTWLQIGGSGNPKTANVPQTVPARLRKLPDSAFKPPE |
| | GSGVKQTLNFDLLKLAGDVESNPGPSVDDHFAKSLGDTWLQIGGSGNPKTA |
| | NVPQTVPARLRKLPDSAFKPPEGSGVKQTLNFDLLKLAGDVESNPGPSVDDH |
| | FAKSLGDTWLQIGGSGNPKTANVPQTVPARLRKLPDSAFKPPE |
| | (TandemPep.MF2A ORF amino acid sequence without v5 |
| | tag) |
| 508 | ATGTCTGTGGATGATCATTTCGCCAAGAGCCTGGGAGATACATGGTTGCA |
| | GATCGGAGGGAGCGGCAATCCCAAAACAGCCAACGTTCCTCAAACCGTA |
| | CCAATGAGGCTCAGGAAACTGCCTGATAGCTTCTTCAAACCCCCTGAAAT |
| | GACCTACCCACGTAGGAGATTCAGAAGACGCAGACATCGGCCAAGGTCA |
| | CATCTTGGACAGATTCTGCGACGGCGCCCTTGGCTGGTGCATCCTCGGCAT |
| | CGGTATCGATGGCGGCGCAAAAACGGGATTTTTAACACCGGAAAACCAAT |
| | CCCCAATCCGCTGCTGGGGCTGGACAGTACG (Super TDU (NLS).cV5) |
| 509 | ATGAGTGTTGATGACCATTTTGCTAAATCACTGGGCGACACGTGGCTTCA |
| | GATAGGCGGAAGTGGGAATCCAAAAACCGCCAACGTGCCACAGACAGTC |
| | CCAATGCGCCTGCGCAAGCTTCCCGATAGCTTTTTTAAGCCCCCGGAACCC |
| | AAAAAAAAGAGAAAGGTGCCCAAAAAAAAACGGAAGGTACCTAAGAAG |
| | AAGCGCAAGGTCGGCATCTTCAACACAGGAAAACCAATACCTAATCCGCT |
| | TCTTGGCTTAGACAGTACC (Super TDU (sv40NLS).cV5) |
| 510 | ATGTCAGTGGACGATCACTTCGCTAAAAGTCTGGGAGACACATGGTTACA |
| | GATCGGCGGCTCTGGAAATCCAAAGACCGCCAACGTGCCTCAAACCGTCC |
| | CCGCTAGACTAAGAAAGCTCCCGGATTCAGCATTTAAACCACCTGAAATG |
| | ACTTATCCCAGACGTCGCTTCAGGCGGCGCCGGCACAGACCCCGCTCACA |
| | TCTGGGACAGATTCTCAGGCGGAGACCATGGCTTGTCCACCCCCGACACA |
| | GATACAGGTGGCGCAGAAAGAACGGTATCTTTAATACTGGCAAGCCAATA |
| | CCAAACCCGCTGCTCGGCCTGGATTCTACG (MF2A(NLS).cV5) |
| 511 | ATGTCAGTGGATGATCACTTTGCCAAGAGCCTAGGCGACACATGGCTGCA |
| | GATTGGTGGGAGTGGGAATCCCAAGACCGCCAATGTTCCCCAGACCGTGC |
| | CAGCGCGGCTTAGAAAACTTCCCGACTCCGCCTTTAAACCGCCTGAACCT |
| | AAAAAAAAAAGGAAAGTCCCGAAGAAGAAACGAAAAGTACCCAAGAAG |
| | AAGAGGAAAGTCGGCAAGCCCATTCCTAACCCTCTCTTGGGACTGGACTC |
| | CACC (MF2A(sv40NLS).cV5) |
| 512 | ATGTCCGTTGATGACGCCGCGGCAAAGAGCCTCGGAGATACCTGGCTCCA |
| | GATCGGTGGATCTGGAAACCCAAAGACCGCCAACGTGCCTCAGACTGTAC |
| | CTGCCCGCTTACGGAAATTGCCCGACTCCGCTTTCAAACCTCCTGAGATGA |
| | CCTATCCAAGGAGACGGTTCCGCAGACGACGCCACCGACCAAGGTCGCAT |
| | CTAGGGCAGATTCTGAGAAGGCGGCCATGGCTGGTCCACCCCAGGCATAG |
| | ATATAGGTGGCGGCGTAAAAATGGGATCTTTAACACAGGAAAACCGATCC |
| | CTAACCCACTGCTTGGACTGGACTCTACC (HFMF4A(NLS).cV5) |
| 513 | ATGTCCGTAGATGACGCCGCTGCGAAGTCACTAGGAGATACGTGGCTGCA |
| | AATTGGAGGGTCCGGCAACCCCAAGACAGCCAACGTACCACAGACGGTT |
| | CCAGCCCGCTTGCGTAAGCTGCCTGATTCTGCGTTCAAACCTCCGGAGCCT |
| | AAAAAGAAACGCAAAGTTCCTAAAAAAAAGCGCAAAGTGCCCAAGAAGA |
| | AGCGAAAAGTTGGAAAACCAATTCCCAACCCTCTGCTGGGTCTCGACTCC |
| | ACG (HFMF4A(sv40NLS).cV5) |
| 514 | ATGAGTACTATGGGAGATCCGGTGGTTGAAGAGCATTTCAGAAGAAGTCT |
| | CGGCAAAAACTACAAGGAACCAGAACCTGCTCCCAACAGCGTGTCTATCA |
| | CGGGTAGCGTCGATGATCATTTCGCAAAGGCACTCGGGGATACTTGGCTA |
| | CAGATTAAGGCGGCAAAGGATAGTGCTATGACTTACCCACGGCGCAGGTT |
| | CCGGCGCCGTAGGCACAGACCCAGGAGCCATTTGGGTCAGATACTCCGCC |
| | GCAGGCCATGGTTAGTGCACCCCAGACATAGATACAGGTGGAGGAGAAA |
| | GAACGGTATTTTCAACACTGGAAAGCCCATTCCCAATCCCCTGCTAGGCC |
| | TCGATTCCACT (huVGLL4-TDU1.2(NLS).cV5) |
| 515 | ATGAGTACTATGGGGGATCCCGTTGTAGAGGAGCATTTTCGCAGGAGTCT |
| | GGGTAAGAATTACAAAGAGCCTGAACCCGCGCCCAATAGCGTTTCCATCA |
| | CAGGAAGCGTTGACGATCACTTCGCGAAGGCTCTGGGTGACACGTGGCTC |
| | CAGATCAAAGCCGCAAAGGATTCCGCGCCCAAGAAGAAGCGGAAGGTGC |
| | CCAAGAAAAAAAGGAAGGTTCCGAAAAAAAAGAGGAAAGTTGGGAAGC |
| | CTATCCCCAACCCCCTACTGGGACTGGACAGCACC |
| | (huVGLL4-TDU1.2(sv40NLS).cV5) |
| 516 | ATGTCCACCATGGGAGACCCCGTCGTCGAAGAGCATTTTAGAAGGAGTCT |
| | CGGCAAAAACTATAAGGAACCAGAGATGACATATCCCCGGAGACGCTTC |
| | CGCCGGAGGCGGCATAGACCTCGGTCCCACCTCGGCCAGATCCTCCGCCG |
| | TAGGCCATGGCTTGTTCACCCACGGCATAGGTATAGATGGCGGAGGAAGA |
| | ATGGGATTTTTAACACA (huVGLL4-TDU1(NLS).cV5) |
| 517 | ATGTCTACAATGAGCGTGTCAATAACAGGTAGTGTAGATGACCACTTCGC |
| | TAAAGCTCTGGGGGATACGTGGCTTCAGATTAAAGCTGCTAAGGATAGTG |
| | CAATGACCTACCCCAGGCGCCGGTTCCGGCGACGTCGCCACCGCCCACGA |
| | TCTCATCTTGGGCAGATCTTACGCCGGCGCCCCTGGCTGGTTCATCCCCGA |
| | CATAGATACCGGTGGAGGAGGAAGAACGGCATTTTCAATACA (huVGLL4- |
| | TDU2(NLS).cV5) |
| 518 | ATGGAAACCCCACTCGACGTCCTATCTAGGGCAGCCAGCCTGGTGCACGC |
| | CGACGATGAAAAACGGGAAGCAGCCCTGCGGGGTGAACCGCGTATTCAA |
| | ACCTTGCCAGTAGCCTCAGCCTTAAGCAGTCATCGTACCGGTCCACCACC |
| | AATAAGCCCAAGTAAACGCAAATTCTCCATGGAGCCTGGAGATGAAGATC |
| | TTGACTGTGACAACGATCATGTGAGCAAAATGTCCCGCATCTTTAACCCTC |
| | ACCTGAATAAAACTGCTAATGGAGACTGTCGACGGGATCCTAGGGAAAG |
| | ATCTCGTTCACCTATTGAACGAGCTGTGGCCCCAACAATGAGTCTTCACG |
| | GCTCACACCTGTACACCTCTTTGCCATCTCTAGGACTCGAGCAGCCTCTCG |
| | CCTTGACTAAGAATTCACTGGATGCCTCAAGGCCCGCGGGGCTTAGTCCC |
| | ACACTGACCCCCGGTGAGCGGCAGCAGAATCGACCATCCGTTATCACCTG |
| | CGCCTCTGCAGGGGCAAGAAACTGTAACTTATCTCATTGCCCTATCGCAC |
| | ATAGTGGATGTGCCGCCCCCGGCCCAGCTTCTTATCGGCGGCCACCTAGC |
| | GCAGCAACCACTTGTGATCCAGTAGTGGAGGAGCATTTTAGGAGGTCCCT |
| | GGGTAAAAACTATAAAGAGCCAGAACCAGCGCCTAACAGTGTGTCCATTA |
| | CAGGCTCAGTGGATGATCATTTCGCAAAGGCTCTGGGGGATACATGGTTG |
| | CAGATCAAAGCCGCTAAAGACGGCGCCAGCTCCAGTCCGGAGTCTGCTTC |
| | GAGGCGGGGGCAGCCCGCGTCCCCTAGCGCCCATATGGTTAGCCATTCAC |
| | ATAGCCCCTCAGTTGTGTCTGGCAAACCTATCCCCAACCCTCTACTGGGTC |
| | TGGATAGCACT (huVGLL4.cV5) |
| 519 | ATGGAAACACCTCTGGACGTCCTGTCAAGAGCCGCCTCACTCGTTCACGC |
| | GGACGACGAGAAACGGGAGGCCGCACTGCGTGGCGAACCACGCATCCAG |
| | ACCCTACCCGTTGCTTCTGCGTTGTCCAGCCATAGAACCGGGCCCCCACCA |
| | ATCTCACCCTCTAAACGCAAGTTTTCCATGGAACCCGGTGACGAGGACTT |
| | GGACTGTGATAATGATCATGTGTCAAAAATGTCGCGCATCTTCAATCCAC |
| | ACCTGAACAAGACGGCTAATGGCGACTGTCGACGGGACCCTCGCGAGAG |
| | GTCCCGGAGCCCAATCGAACGTGCCGTGGCCCCTACTATGAGTCTCCACG |
| | GCTCACATCTATACACCTCTCTCCCGTCACTGGGTCTGGAACAACCACTCG |
| | CCCTCACCAAGAATAGCCTGGATGCATCCCGCCCTGCTGGCCTTAGTCCTA |
| | CTCTCACACCGGGTGAGAGGCAGCAGAACAGGCCCTCTGTCATAACCTGT |
| | GCATCAGCAGGCGCCCGCAATTGCAACCTGAGCCACTGTCCAATCGCCCA |
| | TAGTGGGTGCGCTGCCCCTGGTCCTGCTTCGTACAGGCGCCCCCCGTCCGC |
| | AGCCACAACGTGTGATCCCGTTGTGGAGGAAGCGGCCCGCAGATCCCTCG |
| | GCAAGAATTATAAGGAGCCCGAGCCCGCACCAAATAGTGTCAGCATCAC |
| | AGGGAGCGTCGACGACGCTGCTGCTAAGGCCCTGGGCGATACCTGGCTGC |
| | AGATCAAAGCGGCGAAAGATGGAGCATCCTCATCACCAGAGTCTGCCAGT |
| | AGAAGAGGCCAGCCTGCAAGTCCAAGTGCCCACATGGTATCACACTCCCA |
| | CAGTCCCTCCGTTGTGAGCGGAAAGCCTATCCCCAACCCACTGCTCGGGC |
| | TAGACTCTACC (huVGLL4(HF4A).cV5) |
| 520 | ATGATCCCACGAGATCCCGTGGTTGAGGAGCATTTTCGCAGGAGCCTGGG |
| | AAAAAATTACAAGGAAGGGCTCAGTGAAGCAAAGCCAGCCACCCCTGAA |
| | ATTCAGGAAATCGTTGACAAAGTTAAGCCTCAATTGGAGGAGAAGACTAA |
| | TGAGACTTACGGAAAATTGGAGGCAGTGCAGTACAAAACACAAGTCTTG |
| | GCTTCGACGAATTACTACATCAAGGTAAGAGCGGGGGATAATAAATATAT |
| | GCACCTGAAAGTTTTCAACGGCCCACCTGGTCAGAACGCGGACCGGGTAC |
| | TGACGGGCTATCAGGTGGATAAGAATAAGGACGATGAGCTGACAGGTTTC |
| | CCTAAAAAGAAGCGGAAAGTCCCAAAGAAGAAGCGGAAGGTGCCAAAG |
| | AAAAAACGAAAAGTTGGCAAGCCCATCCCTAACCCCCTCCTGGGCCTAGA |
| | (SQT.(nt)VGLL4-TDU1.(sv40NLS).cV5) |
| 521 | ATGATCCCACGCGGACTGTCCGAGGCCAAACCTGCCACCCCCGAAATCCA |
| | GGAAATCGTTGACAAGGTAAAACCTCAACTAGAAGAGAAAACCAATGAG |
| | ACTTACGGGAAACTGGAAGCCGTGCAGTACAAGACGCAGGTGCTCGATCC |
| | CGTGGTGGAAGAGCACTTTAGACGGAGTCTAGGCAAAAACTATAAAGCC |
| | AGTACGAACTATTACATAAAGGTGCGTGCCGGCGACAACAAATACATGCA |
| | CCTGAAAGTCTTCAACGGCCCTCCTGGGCAAAACGCCGATCGGGTTCTGA |
| | CAGGCTATCAGGTGGACAAAAATAAGGACGACGAGCTCACTGGCTTTCCT |
| | AAAAAGAAACGCAAGGTACCTAAAAAAAAGAGGAAAGTTCCCAAAAAG |
| | AAGCGGAAGGTGGGGAAGCCGATCCCAAACCCATTACTGGGGTTAGACT |
| | CTACA (SQT.(L1)VGLL4-TDU1.(sv40NLS).cV5) |
| 522 | ATGATCCCACGGGGGCTCTCTGAAGCCAAGCCAGCAACCCCCGAAATCCA |
| | AGAAATCGTCGACAAGGTGAAGCCACAGCTGGAAGAGAAGACTAACGAG |
| | ACATACGGGAAGCTCGAGGCAGTACAGTATAAAACACAGGTGCTGGCAA |
| | GTACTAATTACTATATTAAGGTCCGTGCCGGTGACAACAAGTATATGCAC |
| | CTGAAGGTCTTTAATGGCCCAGACCCTGTGGTCGAGGAGCACTTCAGACG |
| | GAGCTTGGGCAAGAACTATAAGCCGGGTCAGAACGCCGATCGAGTGCTG |
| | ACCGGGTACCAGGTTGATAAGAATAAAGATGATGAGCTTACTGGATTCCC |
| | AAAAAAAAAAAGAAAGGTGCCCAAAAAGAAGCGAAAAGTGCCTAAGAA |
| | GAAAAGAAAGGTAGGTAAGCCCATTCCAAACCCACTGCTAGGCCTCGATA |
| | GT (SQT.(L2)VGLL4-TDU1.(sv40NLS).cV5) |
| 523 | ATGATTCCCCGGTCAGTCTCGATTACCGGATCTGTGGACGACCACTTCGCT |
| | AAGGCATTGGGCGACACCTGGCTTCAGATTAAGGGTTTGAGCGAAGCCAA |
| | GCCAGCAACTCCTGAGATCCAAGAGATTGTGGATAAAGTCAAGCCACAGT |
| | TGGAAGAAAAGACAAATGAGACATACGGTAAGCTGGAGGCAGTCCAGTA |
| | CAAAACACAGGTCCTAGCATCTACAAATTATTACATAAAGGTGAGAGCTG |
| | GCGACAATAAGTACATGCACTTAAAGGTGTTCAACGGCCCGCCCGGTCAA |
| | AACGCCGACAGGGTGCTGACTGGGTATCAGGTCGACAAGAATAAAGATG |
| | ACGAGCTCACCGGCTTCCCTAAAAAGAAAAGGAAAGTGCCTAAGAAGAA |
| | ACGCAAAGTGCCAAAGAAAAAACGCAAGGTGGGCAAGCCTATCCCTAAT |
| | CCGCTCTTAGGCTTGGACTCCACT (SQT.(nt)VGLL4-TDU2.(sv40NLS).cV5) |
| 524 | ATGATTCCTAGGGGTCTTTCAGAAGCAAAGCCTGCCACACCCGAAATCCA |
| | GGAAATTGTAGACAAGGTCAAACCTCAACTGGAGGAGAAGACCAACGAA |
| | ACCTACGGTAAGCTGGAAGCCGTGCAGTACAAGACACAAGTTCTGTCAGT |
| | GTCCATTACCGGATCTGTGGATGACCATTTCGCTAAGGCACTGGGGGACA |
| | CTTGGCTGCAGATAAAGGCTTCTACAAATTATTATATTAAGGTGAGGGCT |
| | GGGGACAATAAGTACATGCACTTGAAGGTCTTTAATGGTCCCCCAGGGCA |
| | GAACGCTGACCGCGTGCTCACGGGATATCAGGTTGATAAAAACAAGGAC |
| | GACGAACTGACCGGATTCCCTAAAAAAAAACGGAAAGTTCCCAAGAAAA |
| | AACGAAAAGTGCCTAAAAAGAAGAGAAAGGTTGGCAAACCTATTCCCAA |
| | CCCTCTGCTTGGTCTCGACTCCACA (SQT.(L1)VGLL4-TDU2.(sv40NLS).cV5) |
| 525 | ATGATTCCCCGGGGTCTGAGTGAAGCTAAGCCAGCAACCCCTGAAATACA |
| | AGAAATCGTGGATAAGGTGAAGCCCCAGCTGGAGGAAAAAACAAACGAG |
| | ACGTACGGCAAGCTTGAGGCCGTGCAGTACAAAACCCAAGTGTTGGCTAG |
| | TACCAACTACTATATTAAGGTGAGGGCCGGCGATAATAAGTACATGCACC |
| | TGAAGGTGTTTAACGGACCCTCTGTGTCCATCACCGGATCCGTAGATGAC |
| | CACTTCGCTAAGGCGCTAGGCGATACCTGGCTGCAAATAAAACCCGGTCA |
| | GAACGCCGACAGAGTTTTAACTGGATATCAAGTCGACAAGAATAAGGAC |
| | GATGAGCTCACTGGCTTTCCCAAAAAAAAAAGAAAGGTTCCTAAGAAGA |
| | AAAGGAAAGTCCCCAAAAAGAAACGGAAGGTGGGTAAGCCAATCCCTAA |
| | TCCTCTGCTCGGACTAGATAGCACT |
| | (SQT.(L2)VGLL4-TDU2.(sv40NLS).cV5) |
| 526 | TCAAGCTTTTGGACCCTCGTACAGAAGCTAATACGACTCACTATAGGGAA |
| | ATAAGAGAGAAAAGAAGAGTAAGAAGAAATATAAGAGCCACCATGAGC |
| | GTCGACGATCACTTCGCCAAGTCTCTGGGCGACACCTGGCTGCAGATCGG |
| | CAGCGGCGTGAAGCAAACCCTGAACTTCGACCTGCTGAAACTGGCCGGCG |
| | ATGTGGAGAGCAACCCCGGCCCGTCAGTGGACGACCACTTCGCCAAGAGC |
| | CTGGGAGACACCTGGCTGCAGATCGGCAGCGGCGTGAAGCAGACCTTAA |
| | ACTTCGACCTGCTGAAGCTGGCTGGTGACGTGGAGTCGAACCCCGGCCCC |
| | AGCGTGGACGACCACTTTGCCAAGTCACTGGGGGACACCTGGCTTCAAAT |
| | CGGCAAGCCCATCCCCAACCCCCTGCTGGGCCTGGACAGCACCTGATAAT |
| | AGGCTGGAGCCTCGGTGGCCATGCTTCTTGCCCCTTGGGCCTCCCCCCAGC |
| | CCCTCCTCCCCTTCCTGCACCCGTACCCCCGTGGTCTTTGAATAAAGTCTG |
| | AGTGGGCGGC (TandemPep.VGLL4.superTDU) |
| 527 | ATGAGCGTCGACGATCACTTCGCCAAGTCTCTGGGCGACACCTGGCTGCA |
| | GATCGGCAGCGGCGTGAAGCAAACCCTGAACTTCGACCTGCTGAAACTGG |
| | CCGGCGATGTGGAGAGCAACCCCGGCCCGTCAGTGGACGACCACTTCGCC |
| | AAGAGCCTGGGAGACACCTGGCTGCAGATCGGCAGCGGCGTGAAGCAGA |
| | CCTTAAACTTCGACCTGCTGAAGCTGGCTGGTGACGTGGAGTCGAACCCC |
| | GGCCCCAGCGTGGACGACCACTTTGCCAAGTCACTGGGGGACACCTGGCT |
| | TCAAATCGGCAAGCCCATCCCCAACCCCCTGCTGGGCCTGGACAGCACC |
| | (TandemPep.VGLL4.superTDU ORF) |
| 528 | TCAAGCTTTTGGACCCTCGTACAGAAGCTAATACGACTCACTATAGGGAA |
| | ATAAGAGAGAAAAGAAGAGTAAGAAGAAATATAAGAGCCACCATGTCCG |
| | TCGACGATCACTTTGCGAAGTCACTCGGAGACACCTGGCTCCAAATCGGC |
| | TCCGGTGTCAAGCAGACCTTGAATTTCGACCTTCTGAAGCTGGCCGGCGA |
| | CGTGGAGAGCAACCCAGGCCCTTCGGTGGACGATCATTTCGCTAAGAGCC |
| | TGGGCGACACTTGGCTGCAAATCGGATCCGGAGTGAAGCAGACCCTGAAC |
| | TTCGATCTGCTCAAGCTCGCCGGAGATGTGGAATCCAACCCCGGACCTTC |
| | CGTGGACGACCACTTCGCCAAATCGCTGGGGGACACGTGGCTGCAGATCG |
| | GGAAGCCCATTCCGAACCCGCTGCTGGGTCTGGACAGCACCTGATAATAG |
| | GCTGGAGCCTCGGTGGCCATGCTTCTTGCCCCTTGGGCCTCCCCCCAGCCC |
| | CTCCTCCCCTTCCTGCACCCGTACCCCCGTGGTCTTTGAATAAAGTCTGAG |
| | TGGGCGGC (TandemPep.VGLL4.superTDU (codon optimized)) |
| 529 | ATGTCCGTCGACGATCACTTTGCGAAGTCACTCGGAGACACCTGGCTCCA |
| | AATCGGCTCCGGTGTCAAGCAGACCTTGAATTTCGACCTTCTGAAGCTGG |
| | CCGGCGACGTGGAGAGCAACCCAGGCCCTTCGGTGGACGATCATTTCGCT |
| | AAGAGCCTGGGCGACACTTGGCTGCAAATCGGATCCGGAGTGAAGCAGA |
| | CCCTGAACTTCGATCTGCTCAAGCTCGCCGGAGATGTGGAATCCAACCCC |
| | GGACCTTCCGTGGACGACCACTTCGCCAAATCGCTGGGGGACACGTGGCT |
| | GCAGATCGGGAAGCCCATTCCGAACCCGCTGCTGGGTCTGGACAGCACC |
| | (TandemPep.VGLL4.superTDU (codon optimized) ORF) |
| 530 | TCAAGCTTTTGGACCCTCGTACAGAAGCTAATACGACTCACTATAGGGAA |
| | ATAAGAGAGAAAAGAAGAGTAAGAAGAAATATAAGAGCCACCATGGACC |
| | CCGTGGTGGAGGAGCACTTCAGGAGAAGCCTGGGCAAGAACTACAAGGA |
| | GGGCAGCGGCGTAAAGCAGACCCTGAACTTCGACCTACTGAAACTGGCCG |
| | GCGACGTGGAGAGCAACCCCGGTCCCGACCCTGTGGTGGAGGAGCACTTC |
| | CGAAGAAGCCTGGGCAAGAACTACAAGGAGGGCTCCGGCGTGAAGCAGA |
| | CCCTGAACTTCGATCTGCTGAAGCTGGCTGGCGATGTGGAAAGCAACCCC |
| | GGCCCCGATCCGGTGGTGGAGGAGCACTTCAGAAGATCCCTGGGCAAGA |
| | ACTACAAAGAGGGCAAGCCCATCCCCAACCCCCTGCTGGGCCTGGACAGC |
| | ACCTGATAATAGGCTGGAGCCTCGGTGGCCATGCTTCTTGCCCCTTGGGCC |
| | TCCCCCCAGCCCCTCCTCCCCTTCCTGCACCCGTACCCCCGTGGTCTTTGA |
| | ATAAAGTCTGAGTGGGCGGC (TandemPep.VGLL4.TDU1) |
| 531 | ATGGACCCCGTGGTGGAGGAGCACTTCAGGAGAAGCCTGGGCAAGAACT |
| | ACAAGGAGGGCAGCGGCGTAAAGCAGACCCTGAACTTCGACCTACTGAA |
| | ACTGGCCGGCGACGTGGAGAGCAACCCCGGTCCCGACCCTGTGGTGGAG |
| | GAGCACTTCCGAAGAAGCCTGGGCAAGAACTACAAGGAGGGCTCCGGCG |
| | TGAAGCAGACCCTGAACTTCGATCTGCTGAAGCTGGCTGGCGATGTGGAA |
| | AGCAACCCCGGCCCCGATCCGGTGGTGGAGGAGCACTTCAGAAGATCCCT |
| | GGGCAAGAACTACAAAGAGGGCAAGCCCATCCCCAACCCCCTGCTGGGC |
| | CTGGACAGCACC |
| | (TandemPep.VGLL4.TDU1 ORF) |
| 532 | TCAAGCTTTTGGACCCTCGTACAGAAGCTAATACGACTCACTATAGGGAA |
| | ATAAGAGAGAAAAGAAGAGTAAGAAGAAATATAAGAGCCACCATGGATC |
| | CAGTGGTGGAGGAACATTTCCGCCGGTCACTGGGAAAGAACTATAAGGA |
| | GGGCTCCGGAGTGAAGCAGACTTTGAACTTTGATCTGCTGAAGCTGGCCG |
| | GCGACGTGGAAAGCAACCCTGGTCCTGATCCGGTCGTGGAGGAGCACTTC |
| | CGGAGAAGCCTGGGGAAGAACTACAAGGAAGGATCCGGCGTGAAGCAAA |
| | CCCTCAACTTCGACCTCCTGAAGCTCGCCGGGGACGTCGAGTCGAACCCC |
| | GGTCCCGACCCGGTGGTGGAAGAACACTTCAGGCGCTCCCTTGGAAAGAA |
| | TTACAAGGAGGGCAAACCGATCCCCAACCCTCTGCTGGGACTGGACAGCA |
| | CCTGATAATAGGCTGGAGCCTCGGTGGCCATGCTTCTTGCCCCTTGGGCCT |
| | CCCCCCAGCCCCTCCTCCCCTTCCTGCACCCGTACCCCCGTGGTCTTTGAA |
| | TAAAGTCTGAGTGGGCGGC (TandemPep.VGLL4.TDU1 (codon optimized)) |
| 533 | ATGGATCCAGTGGTGGAGGAACATTTCCGCCGGTCACTGGGAAAGAACTA |
| | TAAGGAGGGCTCCGGAGTGAAGCAGACTTTGAACTTTGATCTGCTGAAGC |
| | TGGCCGGCGACGTGGAAAGCAACCCTGGTCCTGATCCGGTCGTGGAGGAG |
| | CACTTCCGGAGAAGCCTGGGGAAGAACTACAAGGAAGGATCCGGCGTGA |
| | AGCAAACCCTCAACTTCGACCTCCTGAAGCTCGCCGGGGACGTCGAGTCG |
| | AACCCCGGTCCCGACCCGGTGGTGGAAGAACACTTCAGGCGCTCCCTTGG |
| | AAAGAATTACAAGGAGGGCAAACCGATCCCCAACCCTCTGCTGGGACTG |
| | GACAGCACC (TandemPep.VGLL4.TDU1 (codon optimized)ORF) |
| | TCAAGCTTTTGGACCCTCGTACAGAAGCTAATACGACTCACTATAGGGAA |
| | ATAAGAGAGAAAAGAAGAGTAAGAAGAAATATAAGAGCCACCATGAGC |
| | GTTAGTATTACCGGAAGCGTGGACGACCACTTCGCCAAGGCCCTGGGCGA |
| | CACCTGGCTGCAAATTAAGGGCAGCGGCGTAAAGCAGACCCTGAACTTCG |
| | ACCTTCTGAAGCTGGCTGGCGATGTGGAGAGTAACCCCGGCCCCAGCGTG |
| | AGCATAACCGGTTCAGTGGACGATCATTTCGCCAAGGCCCTTGGCGACAC |
| | GTGGCTGCAGATCAAAGGCTCCGGCGTGAAGCAGACCCTGAATTTCGATC |
| | TGCTGAAGTTGGCCGGCGACGTGGAGAGCAACCCCGGCCCCAGCGTGAG |
| | CATCACCGGCAGCGTGGACGACCACTTCGCCAAGGCCCTGGGCGACACCT |
| | GGCTGCAGATCAAGGGCAAGCCCATCCCCAACCCCCTGCTGGGCCTGGAC |
| | AGCACCTGATAATAGGCTGGAGCCTCGGTGGCCATGCTTCTTGCCCCTTG |
| | GGCCTCCCCCCAGCCCCTCCTCCCCTTCCTGCACCCGTACCCCCGTGGTCT |
| | TTGAATAAAGTCTGAGTGGGCGGC (TandemPep.VGLL4.TDU2) |
| 534 | ATGAGCGTTAGTATTACCGGAAGCGTGGACGACCACTTCGCCAAGGCCCT |
| | GGGCGACACCTGGCTGCAAATTAAGGGCAGCGGCGTAAAGCAGACCCTG |
| | AACTTCGACCTTCTGAAGCTGGCTGGCGATGTGGAGAGTAACCCCGGCCC |
| | CAGCGTGAGCATAACCGGTTCAGTGGACGATCATTTCGCCAAGGCCCTTG |
| | GCGACACGTGGCTGCAGATCAAAGGCTCCGGCGTGAAGCAGACCCTGAA |
| | TTTCGATCTGCTGAAGTTGGCCGGCGACGTGGAGAGCAACCCCGGCCCCA |
| | GCGTGAGCATCACCGGCAGCGTGGACGACCACTTCGCCAAGGCCCTGGGC |
| | GACACCTGGCTGCAGATCAAGGGCAAGCCCATCCCCAACCCCCTGCTGGG |
| | CCTGGACAGCACC |
| | (TandemPep.VGLL4.TDU2 ORF) |
| 535 | TCAAGCTTTTGGACCCTCGTACAGAAGCTAATACGACTCACTATAGGGAA |
| | ATAAGAGAGAAAAGAAGAGTAAGAAGAAATATAAGAGCCACCATGTCGG |
| | TGTCAATCACCGGCTCCGTGGATGACCACTTCGCCAAGGCGCTTGGAGAT |
| | ACCTGGCTGCAGATTAAGGGGTCCGGCGTCAAGCAGACTCTCAACTTCGA |
| | TCTGCTCAAGCTGGCTGGCGATGTGGAGAGCAACCCGGGTCCCTCAGTGT |
| | CCATTACCGGATCCGTCGACGACCATTTCGCCAAAGCCCTGGGAGACACT |
| | TGGCTGCAAATCAAGGGGAGCGGAGTGAAGCAGACCCTGAACTTCGACC |
| | TGTTGAAGCTGGCCGGCGACGTGGAATCCAATCCGGGCCCTTCCGTGAGC |
| | ATCACCGGTTCGGTGGACGACCACTTTGCGAAGGCACTCGGAGACACGTG |
| | GCTCCAGATCAAGGGAAAGCCCATCCCTAACCCACTGCTGGGGCTGGACA |
| | GCACCTGATAATAGGCTGGAGCCTCGGTGGCCATGCTTCTTGCCCCTTGG |
| | GCCTCCCCCCAGCCCCTCCTCCCCTTCCTGCACCCGTACCCCCGTGGTCTT |
| | TGAATAAAGTCTGAGTGGGCGGC (TandemPep.VGLL4.TDU2_(codon |
| | optimized)) |
| 536 | ATGTCGGTGTCAATCACCGGCTCCGTGGATGACCACTTCGCCAAGGCGCT |
| | TGGAGATACCTGGCTGCAGATTAAGGGGTCCGGCGTCAAGCAGACTCTCA |
| | ACTTCGATCTGCTCAAGCTGGCTGGCGATGTGGAGAGCAACCCGGGTCCC |
| | TCAGTGTCCATTACCGGATCCGTCGACGACCATTTCGCCAAAGCCCTGGG |
| | AGACACTTGGCTGCAAATCAAGGGGAGCGGAGTGAAGCAGACCCTGAAC |
| | TTCGACCTGTTGAAGCTGGCCGGCGACGTGGAATCCAATCCGGGCCCTTC |
| | CGTGAGCATCACCGGTTCGGTGGACGACCACTTTGCGAAGGCACTCGGAG |
| | ACACGTGGCTCCAGATCAAGGGAAAGCCCATCCCTAACCCACTGCTGGGG |
| | CTGGACAGCACC |
| | (TandemPep.VGLL4.TDU2 (codon optimized)ORF) |
| 537 | TCAAGCTTTTGGACCCTCGTACAGAAGCTAATACGACTCACTATAGGGAA |
| | ATAAGAGAGAAAAGAAGAGTAAGAAGAAATATAAGAGCCACCATGTCCG |
| | TGGACGACGCCGCCGCGAAGAGCCTGGGCGACACCTGGCTGCAGATCGG |
| | CGGAAGCGGCAATCCCAAGACCGCCAACGTGCCCCAAACCGTGCCCGCCC |
| | GCCTGAGAAAACTGCCCGATAGCGCCTTCAAGCCGCCGGAGGGTAGCGG |
| | CGTGAAGCAAACCCTGAACTTCGACCTTCTGAAGCTGGCTGGCGACGTAG |
| | AAAGCAACCCCGGCCCTAGCGTTGACGACGCCGCCGCCAAGAGCCTGGGT |
| | GACACATGGCTACAGATAGGCGGCTCGGGCAACCCCAAGACTGCCAATGT |
| | GCCCCAGACCGTGCCTGCTAGACTGAGAAAACTGCCCGACAGCGCCTTCA |
| | AGCCTCCTGAAGGGAGCGGGGTGAAGCAGACCTTGAACTTTGATCTGTTG |
| | AAGCTGGCCGGCGATGTAGAGAGCAATCCTGGCCCCAGCGTGGACGACG |
| | CTGCCGCCAAGTCACTGGGCGACACCTGGTTACAGATTGGTGGCAGCGGT |
| | AACCCCAAAACCGCCAACGTCCCACAGACCGTACCCGCCAGACTGAGAA |
| | AGCTGCCCGACAGCGCCTTCAAGCCCCCCGAGGGCAAGCCCATTCCCAAC |
| | CCCCTGCTGGGGCTGGACAGCACCTGATAATAGGCTGGAGCCTCGGTGGC |
| | CATGCTTCTTGCCCCTTGGGCCTCCCCCCAGCCCCTCCTCCCCTTCCTGCAC |
| | CCGTACCCCCGTGGTCTTTGAATAAAGTCTGAGTGGGCGGC |
| | (TandemPep.HFMF4A) |
| 538 | ATGTCCGTGGACGACGCCGCCGCGAAGAGCCTGGGCGACACCTGGCTGCA |
| | GATCGGCGGAAGCGGCAATCCCAAGACCGCCAACGTGCCCCAAACCGTG |
| | CCCGCCCGCCTGAGAAAACTGCCCGATAGCGCCTTCAAGCCGCCGGAGGG |
| | TAGCGGCGTGAAGCAAACCCTGAACTTCGACCTTCTGAAGCTGGCTGGCG |
| | ACGTAGAAAGCAACCCCGGCCCTAGCGTTGACGACGCCGCCGCCAAGAG |
| | CCTGGGTGACACATGGCTACAGATAGGCGGCTCGGGCAACCCCAAGACTG |
| | CCAATGTGCCCCAGACCGTGCCTGCTAGACTGAGAAAACTGCCCGACAGC |
| | GCCTTCAAGCCTCCTGAAGGGAGCGGGGTGAAGCAGACCTTGAACTTTGA |
| | TCTGTTGAAGCTGGCCGGCGATGTAGAGAGCAATCCTGGCCCCAGCGTGG |
| | ACGACGCTGCCGCCAAGTCACTGGGCGACACCTGGTTACAGATTGGTGGC |
| | AGCGGTAACCCCAAAACCGCCAACGTCCCACAGACCGTACCCGCCAGACT |
| | GAGAAAGCTGCCCGACAGCGCCTTCAAGCCCCCCGAGGGCAAGCCCATTC |
| | CCAACCCCCTGCTGGGGCTGGACAGCACC (TandemPep.HFMF4A ORF) |
| 539 | TCAAGCTTTTGGACCCTCGTACAGAAGCTAATACGACTCACTATAGGGAA |
| | ATAAGAGAGAAAAGAAGAGTAAGAAGAAATATAAGAGCCACCATGAGC |
| | GTGGATGATGCAGCGGCGAAGTCCCTGGGGGATACATGGCTTCAGATTGG |
| | TGGATCGGGGAACCCTAAGACTGCCAACGTCCCGCAAACTGTGCCTGCTC |
| | GCCTGAGGAAGCTCCCGGACTCTGCCTTCAAACCCCCTGAAGGCTCAGGA |
| | GTCAAGCAGACTCTCAACTTTGACCTCCTTAAGCTGGCCGGGGATGTGGA |
| | GTCGAACCCCGGGCCTTCCGTCGACGACGCCGCTGCTAAGTCCCTCGGAG |
| | ACACCTGGCTGCAGATCGGCGGATCGGGCAACCCCAAGACGGCCAATGT |
| | GCCACAGACCGTGCCCGCCCGGCTGAGAAAGCTGCCGGACAGCGCGTTCA |
| | AGCCTCCTGAAGGATCCGGCGTGAAGCAGACCCTGAACTTCGACTTGCTG |
| | AAACTGGCCGGCGACGTGGAATCAAACCCGGGACCGAGCGTGGACGACG |
| | CGGCCGCCAAATCCCTGGGCGACACTTGGCTCCAAATCGGTGGATCCGGC |
| | AATCCCAAGACCGCCAACGTGCCCCAGACCGTCCCGGCCCGGCTGCGCAA |
| | GTTGCCAGATTCCGCATTCAAGCCGCCTGAGGGAAAGCCGATCCCGAACC |
| | CCCTGCTCGGTCTGGATAGCACCTGATAATAGGCTGGAGCCTCGGTGGCC |
| | ATGCTTCTTGCCCCTTGGGCCTCCCCCCAGCCCCTCCTCCCCTTCCTGCACC |
| | CGTACCCCCGTGGTCTTTGAATAAAGTCTGAGTGGGCGGC |
| | (TandemPep.HFMF4A (codon optimized)) |
| 540 | ATGAGCGTGGATGATGCAGCGGCGAAGTCCCTGGGGGATACATGGCTTCA |
| | GATTGGTGGATCGGGGAACCCTAAGACTGCCAACGTCCCGCAAACTGTGC |
| | CTGCTCGCCTGAGGAAGCTCCCGGACTCTGCCTTCAAACCCCCTGAAGGC |
| | TCAGGAGTCAAGCAGACTCTCAACTTTGACCTCCTTAAGCTGGCCGGGGA |
| | TGTGGAGTCGAACCCCGGGCCTTCCGTCGACGACGCCGCTGCTAAGTCCC |
| | TCGGAGACACCTGGCTGCAGATCGGCGGATCGGGCAACCCCAAGACGGC |
| | CAATGTGCCACAGACCGTGCCCGCCCGGCTGAGAAAGCTGCCGGACAGC |
| | GCGTTCAAGCCTCCTGAAGGATCCGGCGTGAAGCAGACCCTGAACTTCGA |
| | CTTGCTGAAACTGGCCGGCGACGTGGAATCAAACCCGGGACCGAGCGTG |
| | GACGACGCGGCCGCCAAATCCCTGGGCGACACTTGGCTCCAAATCGGTGG |
| | ATCCGGCAATCCCAAGACCGCCAACGTGCCCCAGACCGTCCCGGCCCGGC |
| | TGCGCAAGTTGCCAGATTCCGCATTCAAGCCGCCTGAGGGAAAGCCGATC |
| | CCGAACCCCCTGCTCGGTCTGGATAGCACC (TandemPep.HFMF4A |
| | (codon optimized)ORF) |
| 541 | TCAAGCTTTTGGACCCTCGTACAGAAGCTAATACGACTCACTATAGGGAA |
| | ATAAGAGAGAAAAGAAGAGTAAGAAGAAATATAAGAGCCACCATGAGC |
| | GTGGACGACCACTTCGCCAAGAGCCTGGGCGACACCTGGTTACAGATAGG |
| | CGGGTCTGGCAATCCTAAGACCGCGAACGTTCCCCAAACCGTCCCGGCCA |
| | GACTGAGAAAACTGCCAGATAGCGCCTTCAAGCCCCCCGAAGGTAGCGG |
| | CGTCAAACAGACCCTTAATTTCGATTTACTGAAGCTCGCCGGCGACGTGG |
| | AGTCGAACCCCGGCCCCAGCGTGGACGATCACTTCGCTAAGTCGCTGGGC |
| | GACACCTGGCTGCAGATTGGCGGCTCGGGAAACCCCAAGACCGCCAACGT |
| | GCCCCAGACTGTGCCCGCTAGACTCAGAAAGCTTCCTGACAGCGCCTTCA |
| | AGCCCCCCGAAGGCAGCGGAGTTAAACAAACCTTAAACTTCGACCTACTG |
| | AAACTGGCCGGGGACGTGGAGAGCAATCCCGGTCCCTCCGTCGACGATCA |
| | CTTCGCGAAGAGCCTGGGCGATACCTGGCTTCAGATCGGCGGCAGCGGCA |
| | ATCCAAAGACAGCCAACGTGCCACAGACCGTGCCCGCCAGACTGAGAAA |
| | GCTGCCCGACTCGGCCTTCAAGCCACCTGAGGGCAAACCCATCCCCAACC |
| | CCCTGCTGGGACTGGACAGCACCTGATAATAGGCTGGAGCCTCGGTGGCC |
| | ATGCTTCTTGCCCCTTGGGCCTCCCCCCAGCCCCTCCTCCCCTTCCTGCACC |
| | CGTACCCCCGTGGTCTTTGAATAAAGTCTGAGTGGGCGGC |
| | (TandemPep.MF2A) |
| 542 | ATGAGCGTGGACGACCACTTCGCCAAGAGCCTGGGCGACACCTGGTTACA |
| | GATAGGCGGGTCTGGCAATCCTAAGACCGCGAACGTTCCCCAAACCGTCC |
| | CGGCCAGACTGAGAAAACTGCCAGATAGCGCCTTCAAGCCCCCCGAAGGT |
| | AGCGGCGTCAAACAGACCCTTAATTTCGATTTACTGAAGCTCGCCGGCGA |
| | CGTGGAGTCGAACCCCGGCCCCAGCGTGGACGATCACTTCGCTAAGTCGC |
| | TGGGCGACACCTGGCTGCAGATTGGCGGCTCGGGAAACCCCAAGACCGCC |
| | AACGTGCCCCAGACTGTGCCCGCTAGACTCAGAAAGCTTCCTGACAGCGC |
| | CTTCAAGCCCCCCGAAGGCAGCGGAGTTAAACAAACCTTAAACTTCGACC |
| | TACTGAAACTGGCCGGGGACGTGGAGAGCAATCCCGGTCCCTCCGTCGAC |
| | GATCACTTCGCGAAGAGCCTGGGCGATACCTGGCTTCAGATCGGCGGCAG |
| | CGGCAATCCAAAGACAGCCAACGTGCCACAGACCGTGCCCGCCAGACTG |
| | AGAAAGCTGCCCGACTCGGCCTTCAAGCCACCTGAGGGCAAACCCATCCC |
| | CAACCCCCTGCTGGGACTGGACAGCACC (TandemPep.MF2A ORF) |
| 543 | TCAAGCTTTTGGACCCTCGTACAGAAGCTAATACGACTCACTATAGGGAA |
| | ATAAGAGAGAAAAGAAGAGTAAGAAGAAATATAAGAGCCACCATGTCCG |
| | TGGATGACCACTTTGCTAAGTCGCTGGGAGATACCTGGCTGCAGATCGGA |
| | GGCTCCGGGAACCCAAAGACTGCGAACGTGCCCCAGACCGTGCCGGCCC |
| | GGCTGAGGAAGCTGCCTGACTCCGCGTTCAAGCCGCCCGAAGGATCCGGA |
| | GTGAAGCAGACGCTGAATTTCGATCTGCTCAAGCTGGCCGGCGACGTGGA |
| | GTCGAACCCGGGTCCGAGCGTGGACGATCATTTCGCAAAGTCACTCGGAG |
| | ACACTTGGCTGCAAATTGGGGGCAGCGGCAACCCTAAAACCGCCAACGTG |
| | CCACAGACTGTGCCGGCTAGATTGCGGAAGCTCCCTGACTCGGCCTTCAA |
| | GCCCCCTGAAGGCAGCGGGGTCAAGCAGACCCTCAACTTCGACCTTCTCA |
| | AGTTGGCGGGAGATGTCGAGTCAAACCCAGGACCGTCCGTCGACGATCAC |
| | TTCGCCAAATCCCTGGGCGACACCTGGCTTCAAATCGGCGGTTCCGGAAA |
| | CCCTAAGACTGCAAACGTCCCTCAAACCGTGCCCGCCCGCCTGCGCAAGC |
| | TGCCGGACAGCGCCTTCAAACCGCCCGAGGGAAAGCCCATCCCCAATCCC |
| | CTGCTGGGTCTGGACAGCACCTGATAATAGGCTGGAGCCTCGGTGGCCAT |
| | GCTTCTTGCCCCTTGGGCCTCCCCCCAGCCCCTCCTCCCCTTCCTGCACCC |
| | GTACCCCCGTGGTCTTTGAATAAAGTCTGAGTGGGCGGC |
| | (TandemPep.MF2A (co-op'd)) |
| 544 | ATGTCCGTGGATGACCACTTTGCTAAGTCGCTGGGAGATACCTGGCTGCA |
| | GATCGGAGGCTCCGGGAACCCAAAGACTGCGAACGTGCCCCAGACCGTG |
| | CCGGCCCGGCTGAGGAAGCTGCCTGACTCCGCGTTCAAGCCGCCCGAAGG |
| | ATCCGGAGTGAAGCAGACGCTGAATTTCGATCTGCTCAAGCTGGCCGGCG |
| | ACGTGGAGTCGAACCCGGGTCCGAGCGTGGACGATCATTTCGCAAAGTCA |
| | CTCGGAGACACTTGGCTGCAAATTGGGGGCAGCGGCAACCCTAAAACCGC |
| | CAACGTGCCACAGACTGTGCCGGCTAGATTGCGGAAGCTCCCTGACTCGG |
| | CCTTCAAGCCCCCTGAAGGCAGCGGGGTCAAGCAGACCCTCAACTTCGAC |
| | CTTCTCAAGTTGGCGGGAGATGTCGAGTCAAACCCAGGACCGTCCGTCGA |
| | CGATCACTTCGCCAAATCCCTGGGCGACACCTGGCTTCAAATCGGCGGTT |
| | CCGGAAACCCTAAGACTGCAAACGTCCCTCAAACCGTGCCCGCCCGCCTG |
| | CGCAAGCTGCCGGACAGCGCCTTCAAACCGCCCGAGGGAAAGCCCATCCC |
| | CAATCCCCTGCTGGGTCTGGACAGCACC |
| | (TandemPep.MF2A (co-op'd) ORF) |
| 545 | GKPIPNPLLGLDST (V5 epitope tag) |
| 546 | MGTMENLSRRLKVTGDLFDIMSGSGVKQTLNFDLLKLAGDVESNPGPGTM |
| | ENLSRRLKVTGDLFDIMSGSGVKQTLNFDLLKLAGDVESNPGPGTMENLS |
| | RRLKVTGDLFDIMS (BeclinBH3x3.F2A, no epitope tag) |
| 547 | MGTMENLSRRLKVTGDLFDIMSGSGVKQTLNFDLLKLAGDVESNPGPGTM |
| | ENLSRRLKVTGDLFDIMSGSGVKQTLNFDLLKLAGDVESNPGPGTMENLS |
| | RRLKVTGDLFDIMSGKPIPNPLLGLDST |
| | (BeclinBH3x3.F2A, V5 epitope tag) |
| 548 | ATGGGCACCATGGAGAATCTTAGCAGACGACTGAAAGTGACCGGCGATCT |
| | GTTCGACATCATGAGCGGCAGCGGCGTGAAGCAGACCCTGAACTTTGACT |
| | TGCTGAAGCTGGCCGGCGACGTGGAAAGCAACCCCGGACCCGGCACCAT |
| | GGAGAACCTGAGCCGGCGGCTGAAGGTGACCGGCGACTTGTTCGACATCA |
| | TGAGCGGCAGCGGAGTGAAGCAGACTTTGAACTTCGACCTTCTGAAACTG |
| | GCCGGCGATGTGGAGAGCAATCCAGGCCCGGGCACCATGGAGAATCTGA |
| | GCAGAAGACTGAAGGTGACTGGCGACCTGTTCGACATTATGAGCGGCAA |
| | GCCCATCCCCAACCCCCTGCTGGGTCTGGATAGCACC |
| | (BeclinBH3x3.F2A, V5 epitope tag) |
| 549 | ATGGGAACTATGGAGAACCTGTCGCGGAGGTTGAAAGTGACCGGCGACC |
| | TGTTTGACATTATGTCCGGCTCCGGAGTGAAGCAGACCCTGAACTTCGAC |
| | CTTTTGAAGCTGGCCGGCGACGTGGAATCGAACCCAGGCCCTGGTACTAT |
| | GGAAAACCTCAGCAGACGCCTGAAAGTCACCGGAGATCTGTTCGACATCA |
| | TGAGCGGATCCGGCGTGAAGCAAACTCTGAATTTCGACCTCCTGAAGCTT |
| | GCGGGAGATGTGGAGTCAAACCCGGGGCCCGGTACCATGGAAAATCTGT |
| | CCCGCCGGCTCAAGGTCACCGGGGACCTGTTCGATATCATGTCCGGGAAG |
| | CCTATCCCCAACCCGCTGCTGGGACTCGACAGCACC |
| | (BeclinBH3x3.F2A, V5 epitope tag) |

The application's sequence listing, which the Patent Office published only in electronic form, follows.

SEQUENCE LISTING (552 sequences)

SEQ ID NO: 1 - protein, 15 aa, Artificial Sequence
  Synthetic: BH3 domain amino acid sequence
LALRLACIGDEMDVS

SEQ ID NO: 2 - protein, 15 aa, Artificial Sequence
  Synthetic: BH3 domain amino acid sequence
EKAELLQGGDLLRQR

SEQ ID NO: 3 - protein, 15 aa, Artificial Sequence
  Synthetic: BH3 domain amino acid sequence
VESILKKNSDWIWDW

SEQ ID NO: 4 - protein, 15 aa, Artificial Sequence
  Synthetic: BH3 domain amino acid sequence
EVEALKKSADWVSDW

SEQ ID NO: 5 - protein, 15 aa, Artificial Sequence
  Synthetic: BH3 domain amino acid sequence
TAARLKALGDELHQR

SEQ ID NO: 6 - protein, 15 aa, Artificial Sequence
  Synthetic: BH3 domain amino acid sequence
IAQELRRIGDEFNAY

SEQ ID NO: 7 - protein, 15 aa, Artificial Sequence
  Synthetic: BH3 domain amino acid sequence
YGRELRRMSDEFVDS

SEQ ID NO: 8 - protein, 15 aa, Artificial Sequence
  Synthetic: BH3 domain amino acid sequence
IARHLAQVGDSMDRS

SEQ ID NO: 9 - protein, 15 aa, Artificial Sequence
  Synthetic: BH3 domain amino acid sequence
IARKLQCIADQFHRL

SEQ ID NO: 10 - protein, 15 aa, Artificial Sequence
  Synthetic: BH3 domain amino acid sequence
CATQLRRFGDKLNFR

SEQ ID NO: 11 - protein, 15 aa, Artificial Sequence
  Synthetic: BH3 domain amino acid sequence
IGAQLRRMADDLNAQ

SEQ ID NO: 12 - protein, 15 aa, Artificial Sequence
  Synthetic: BH3 domain amino acid sequence
LSRRLKVTGDLFDIM

SEQ ID NO: 13 - protein, 15 aa, Artificial Sequence
  Synthetic: BH3 domain amino acid sequence
IVELLKYSGDQLERK

SEQ ID NO: 14 - protein, 15 aa, Artificial Sequence
  Synthetic: BH3 domain amino acid sequence
ALETLRRVGDGVQRN

SEQ ID NO: 15 - protein, 15 aa, Artificial Sequence
  Synthetic: BH3 domain amino acid sequence
IGSKLAAMCDDFDAQ

SEQ ID NO: 16 - protein, 15 aa, Artificial Sequence
  Synthetic: BH3 domain amino acid sequence
IGRKLTVMCDEFDSE

SEQ ID NO: 17 - protein, 15 aa, Artificial Sequence
  Synthetic: BH3 domain amino acid sequence
NIRRLRALADGVQKV

SEQ ID NO: 18 - protein, 15 aa, Artificial Sequence
  Synthetic: BH3 domain amino acid sequence
NIDKLRALADDIDKT

SEQ ID NO: 19 - protein, 15 aa, Artificial Sequence
  Synthetic: BH3 domain amino acid sequence
MVTLLPIEGQEIHFF

SEQ ID NO: 20 - protein, 15 aa, Artificial Sequence
  Synthetic: BH3 domain amino acid sequence
PTVPLPSETDGYVAP

SEQ ID NO: 21 - protein, 15 aa, Artificial Sequence
  Synthetic: BH3 domain amino acid sequence
PQRYLVIQGDDRMKL

SEQ ID NO: 22 - protein, 15 aa, Artificial Sequence
  Synthetic: BH3 domain amino acid sequence
TVGELSRALGHENGS

SEQ ID NO: 23 - protein, 15 aa, Artificial Sequence
  Synthetic: BH3 domain amino acid sequence
VGQLLQDMGDDVYQQ

SEQ ID NO: 24 - protein, 15 aa, Artificial Sequence
  Synthetic: BH3 domain amino acid sequence
LHEVLNGLLDRPDWE

SEQ ID NO: 25 - protein, 15 aa, Artificial Sequence
  Synthetic: BH3 domain amino acid sequence
AVHSLSRIGDELYLE

SEQ ID NO: 26 - protein, 15 aa, Artificial Sequence
  Synthetic: BH3 domain amino acid sequence
NPKFLKNAGRDCSRR

SEQ ID NO: 27 - protein, 26 aa, Artificial Sequence
  Synthetic: BH3 domain amino acid sequence
EEQWAREIGAQLRRMADDLNAQYERR

SEQ ID NO: 28 - protein, 26 aa, Artificial Sequence
  Synthetic: BH3 domain amino acid sequence
DMRPEIWIAQELRRIGDEFNAYYARR

SEQ ID NO: 29 - protein, 26 aa, Artificial Sequence
  Synthetic: BH3 domain amino acid sequence
NLWAAQRYGRELRRMSDEFVDSFKKG

SEQ ID NO: 30 - protein, 25 aa, Artificial Sequence
  Synthetic: BH3 domain amino acid sequence)
PAELEVECATQLRRFGKLNFRQKLL

SEQ ID NO: 31 - RNA, 22 nt, Artificial Sequence
  Synthetic: miR-122 sequence
uauuuagugugauaauggcguu

SEQ ID NO: 32 - RNA, 22 nt, Artificial Sequence
  Synthetic: miR-122 sequence
caaacaccauugucacacucca

SEQ ID NO: 33 - RNA, 22 nt, Artificial Sequence
  Synthetic: miR-21 sequence
uagcuuaucagacugauguuga

SEQ ID NO: 34 - RNA, 21 nt, Artificial Sequence
  Synthetic: miR-21 sequence
caacaccagucgaugggcugu

SEQ ID NO: 35 - protein, 22 aa, Artificial Sequence
  Synthetic: 2A peptide amino acid sequence
GSGATNFSLLKQAGDVEENPGP

SEQ ID NO: 36 - DNA, 66 bp, Artificial Sequence
  Synthetic: 2A peptide encoding sequence
ggaagcggagctactaacttcagcctgctgaagcaggctggagacgtggaggagaaccctggacct

SEQ ID NO: 37 - DNA, 108 bp, Artificial Sequence
  Synthetic: 2A peptide encoding sequence
tccggactcagatccggggatctcaaaattgtcgctcctgtcaaacaaactcttaactttgatttactcaaactggctggggatgtagaaagcaatccaggtccactc

SEQ ID NO: 38 - protein, 239 aa, Homo sapiens
  misc_feature (1)..(239): Human Bcl-2 amino acid sequence
MAHAGRTGYDNREIVMKYIHYKLSQRGYEWDAGDVGAAPPGAAPAPGIFSSQPGHTPHPAASRDPVARTSPLQTPAAPGAAAGPALSPVPPVVHLTLRQAGDDFSRRYRRDFAEMSSQLHLTPFTARGRFATVVEELFRDGVNWGRIVAFFEFGGVMCVESVNREMSPLVDNIALWMTEYLNRHLHTWIQDNGGWDAFVELYGPSMRPLFDFSWLSLKTLLSLALVGACITLGAYLGHK

SEQ ID NO: 39 - protein, 233 aa, Homo sapiens
  misc_feature (1)..(233): Human Bcl-XL amino acid sequence
MSQSNRELVVDFLSYKLSQKGYSWSQFSDVEENRTEAPEGTESEMETPSAINGNPSWHLADSPAVNGATGHSSSLDAREVIPMAAVKQALREAGDEFELRYRRAFSDLTSQLHITPGTAYQSFEQVVNELFRDGVNWGRIVAFFSFGGALCVESVDKEMQVLVSRIAAWMATYLNDHLEPWIQENGGWDTFVELYGNNAAAESRKGQERFNRWFLTGMTVAGVVLLGSLFSRK

SEQ ID NO: 40 - protein, 193 aa, Homo sapiens
  misc_feature (1)..(193): Human Bcl-w amino acid sequence
MATPASAPDTRALVADFVGYKLRQKGYVCGAGPGEGPAADPLHQAMRAAGDEFETRFRRTFSDLAAQLHVTPGSAQQRFTQVSDELFQGGPNWGRLVAFFVFGAALCAESVNKEMEPLVGQVQEWMVAYLETRLADWIHSSGGWAEFTALYGDGALEEARRLREGNWASVRTVLTGAVALGALVTVGAFFASK

SEQ ID NO: 41 - protein, 350 aa, Homo sapiens
  misc_feature (1)..(350): Human Mcl-1 amino acid sequence
MFGLKRNAVIGLNLYCGGAGLGAGSGGATRPGGRLLATEKEASARREIGGGEAGAVIGGSAGASPPSTLTPDSRRVARPPPIGAEVPDVTATPARLLFFAPTRRAAPLEEMEAPAADAIMSPEEELDGYEPEPLGKRPAVLPLLELVGESGNNTSTDGSLPSTPPPAEEEEDELYRQSLEIISRYLREQATGAKDTKPMGRSGATSRKALETLRRVGDGVQRNHETAFQGMLRKLDIKNEDDVKSLSRVMIHVFSDGVTNWGRIVTLISFGAFVAKHLKTINQESCIEPLAESITDVLVRTKRDWLVKQRGWDGFVEFFHVEDLEGGIRNVLLAFAGVAGVGAGLAYLIR

SEQ ID NO: 42 - protein, 175 aa, Homo sapiens
  misc_feature (1)..(175): Human Bcl-related protein A1 amino acid sequence
MTDCEFGYIYRLAQDYLQCVLQIPQPGSGPSKTSRVLQNVAFSVQKEVEKNLKSCLDNVNVVSVDTARTLFNQVMEKEFEDGIINWGRIVTIFAFEGILIKKLLRQQIAPDVDTYKEISYFVAEFIMNNTGEWIRQNGGWENGFVKKFEPKSGWMTFLEVTGKICEMLSLLKQYC

SEQ ID NO: 43 - DNA, 393 bp, Artificial Sequence
  Synthetic: SQT(nt)BID-BH3 mRNA sequence with FLAG epitope tag
atgatacccagacaagaggacatcattcgtaacatcgcgcgacacctggcccaggtgggggactccatggatcgatcaatcccccctggcttatccgaagctaagccagccacccctgagatccaagaaatcgtcgacaaggtcaagccccaacttgaagagaaaactaatgaaacttatggtaagctcgaagccgtgcaatacaagactcaggtcctggcgtctacaaattattacatcaaggtgagggccggggacaataagtatatgcatctgaaagtcttcaatggcccccctggacaaaacgcagatcgggtgctcacaggataccaggtcgataaaaataaagatgacgaacttactgggtttgattataaagatgatgatgacaag

SEQ ID NO: 44 - DNA, 396 bp, Artificial Sequence
  Synthetic: SQT(L1)BID-BH3 mRNA sequence with FLAG epitope tag
atgattcctcggggtttgtcagaggcaaagccagccaccccagaaatacaggaaatcgtagacaaagtgaagccccagcttgaggaaaaaactaacgagacctacgggaagctggaagctgtgcagtacaagacccaggtgctacaggaggacatcattaggaatattgcgagacatctggcgcaagtgggtgactctatggatcgttccattccaccgggtgcaagcaccaattattacatcaaagtgcgtgctggagacaacaaatatatgcacctcaaggtttttaacgggccgccaggacagaatgcagaccgtgtgcttaccgggtatcaggtagacaaaaataaagatgacgagctgactggctttgactacaaggatgacgatgacaag

SEQ ID NO: 45 - DNA, 390 bp, Artificial Sequence
  Synthetic: SQT(L2)BID-BH3 mRNA sequence with FLAG epitope tag
atgatccccaggggactctccgaggcaaagccagccacacctgaaattcaggaaatcgttgataaagtaaagccacagcttgaggaaaaaaccaatgagacgtacggcaaactcgaagccgtgcagtacaagacccaggtattagcctccaccaactactacataaaggtgcgggccggcgacaacaagtacatgcatctgaaagtattcaacggtccccaggaagacattataaggaacattgcccgccatcttgctcaggtgggcgattccatggaccgtagcatacctcctgggcagaacgccgatcgcgtactcacgggctatcaagtcgataaaaacaaggatgatgaattgactgggtttgattacaaagatgatgacgataag

SEQ ID NO: 46 - DNA, 369 bp, Artificial Sequence
  Synthetic: SQT(nt)BID-BH3 mRNA sequence without epitope tag
atgatacccagacaagaggacatcattcgtaacatcgcgcgacacctggcccaggtgggggactccatggatcgatcaatcccccctggcttatccgaagctaagccagccacccctgagatccaagaaatcgtcgacaaggtcaagccccaacttgaagagaaaactaatgaaacttatggtaagctcgaagccgtgcaatacaagactcaggtcctggcgtctacaaattattacatcaaggtgagggccggggacaataagtatatgcatctgaaagtcttcaatggcccccctggacaaaacgcagatcgggtgctcacaggataccaggtcgataaaaataaagatgacgaacttactgggttt

SEQ ID NO: 47 - DNA, 372 bp, Artificial Sequence
  Synthetic: SQT(L1)BID-BH3 mRNA sequence without epitope tag
atgattcctcggggtttgtcagaggcaaagccagccaccccagaaatacaggaaatcgtagacaaagtgaagccccagcttgaggaaaaaactaacgagacctacgggaagctggaagctgtgcagtacaagacccaggtgctacaggaggacatcattaggaatattgcgagacatctggcgcaagtgggtgactctatggatcgttccattccaccgggtgcaagcaccaattattacatcaaagtgcgtgctggagacaacaaatatatgcacctcaaggtttttaacgggccgccaggacagaatgcagaccgtgtgcttaccgggtatcaggtagacaaaaataaagatgacgagctgactggcttt

SEQ ID NO: 48 - DNA, 366 bp, Artificial Sequence
  Synthetic: SQT(L2)BID-BH3 mRNA sequence without epitope tag
atgatccccaggggactctccgaggcaaagccagccacacctgaaattcaggaaatcgttgataaagtaaagccacagcttgaggaaaaaaccaatgagacgtacggcaaactcgaagccgtgcagtacaagacccaggtattagcctccaccaactactacataaaggtgcgggccggcgacaacaagtacatgcatctgaaagtattcaacggtccccaggaagacattataaggaacattgcccgccatcttgctcaggtgggcgattccatggaccgtagcatacctcctgggcagaacgccgatcgcgtactcacgggctatcaagtcgataaaaacaaggatgatgaattgactgggttt

SEQ ID NO: 49 - DNA, 396 bp, Artificial Sequence
  Synthetic: SQT-PUMA-BH3 mRNA sequence with FLAG epitope tag
atgatcccaagagaagaacagtgggcacgcgaaattggagctcaactcagacggatggccgacgacctgaacgcccagtacgagcggcggggactctcagaagcgaagcctgccacccccgaaatccaggaaatcgtcgacaaggtcaagccgcagcttgaggaaaagaccaacgagacttacggaaaactggaggccgtgcagtataagacccaagtgttggcctccaccaactactacattaaggtccgcgccggcgataacaagtacatgcacctgaaggtgttcaatggtcctccgggacagaacgcggacagggtgctgactggctaccaagtggacaagaacaaggacgacgagctgacgggcttcgactacaaggatgatgatgacaaa

SEQ ID NO: 50 - DNA, 396 bp, Artificial Sequence
  Synthetic: SQT-BIM-BH3 mRNA sequence with FLAG epitope tag
atgatcccaagagacatgcgccccgaaatttggatcgcccaggagctcagacgcatcggagatgaattcaacgcatactacgctcggcggggactctcagaagcgaagcctgccacccccgaaatccaggaaatcgtcgacaaggtcaagccgcagcttgaggaaaagaccaacgagacttacggaaaactggaggccgtgcagtataagacccaagtgttggcctccaccaactactacattaaggtccgcgccggcgataacaagtacatgcacctgaaggtgttcaatggtcctccgggacagaacgcggacagggtgctgactggctaccaagtggacaagaacaaggacgacgagctgacgggcttcgactacaaggatgatgatgacaaa

SEQ ID NO: 51 - DNA, 396 bp, Artificial Sequence
  Synthetic: SQT-BAD-BH3 mRNA sequence with FLAG epitope tag
atgatcccaagaaacctgtgggctgcacaacgctacggaagagaactgcgccggatgagcgacgaatttgtggactcgttcaagaaggggggactctcagaagcgaagcctgccacccccgaaatccaggaaatcgtcgacaaggtcaagccgcagcttgaggaaaagaccaacgagacttacggaaaactggaggccgtgcagtataagacccaagtgttggcctccaccaactactacattaaggtccgcgccggcgataacaagtacatgcacctgaaggtgttcaatggtcctccgggacagaacgcggacagggtgctgactggctaccaagtggacaagaacaaggacgacgagctgacgggcttcgactacaaggatgatgatgacaaa

SEQ ID NO: 52 - DNA, 396 bp, Artificial Sequence
  Synthetic: SQT-NoxA-BH3 mRNA sequence with FLAG epitope tag
atgatcccaagacccgcagagctcgaagtggaatgcgctacccaacttagacggttcggagacaagctgaactttcggcagaagctcctgggactctcagaagcgaagcctgccacccccgaaatccaggaaatcgtcgacaaggtcaagccgcagcttgaggaaaagaccaacgagacttacggaaaactggaggccgtgcagtataagacccaagtgttggcctccaccaactactacattaaggtccgcgccggcgataacaagtacatgcacctgaaggtgttcaatggtcctccgggacagaacgcggacagggtgctgactggctaccaagtggacaagaacaaggacgacgagctgacgggcttcgactacaaggatgatgatgacaaa

SEQ ID NO: 53 - protein, 98 aa, Artificial Sequence
  Synthetic: WT SteA scaffold amino acid sequence
MIPGGLSEAKPATPEIQEIVDKVKPQLEEKTNETYGKLEAVQYKTQVVAGTNYYIKVRAGDNKYMHLKVFKSLPGQNEDLVLTGYQVDKNKDDELTGF

SEQ ID NO: 54 - protein, 98 aa, Artificial Sequence
  Synthetic: SteA scaffold(STM) amino acid sequence
MIPWGLSEAKPATPEIQEIVDKVKPQLEEKTNETYGKLEAVQYKTQVDAGTNYYIKVRAGDNKYMHLKVFNGPPGQNEDLVLTGYQVDKNKDDELTGF

SEQ ID NO: 55 - protein, 98 aa, Artificial Sequence
  Synthetic: SteA scaffold(SDM) amino acid sequence
MIPGGLSEAKPATPEIQEIVDKVKPQLEEKTNETYGKLEAVQYKTQVLASTNYYIKVRAGDNKYMHLKVFNGPPGQNEDLVRSGYQVDKNKDDELTGF

SEQ ID NO: 56 - protein, 98 aa, Artificial Sequence
  Synthetic: SteA scaffold(SQM) amino acid sequence
MIPRGLSEAKPATPEIQEIVDKVKPQLEEKTNETYGKLEAVQYKTQVLASTNYYIKVRAGDNKYMHLKVFNGPPGQNEDLVRSGYQVDKNKDDELTGF

SEQ ID NO: 57 - protein, 98 aa, Artificial Sequence
  Synthetic: SteA scaffold(SUC) amino acid sequence
MIPGGLSEAKPATPEIQEIVDKVKPQLEEKTNETYGKLEAVQYKTQVVAGTNYYIKVRAGDNKYMHLKVFNGPPGQNEDLVRSGYQVDKNKDDELTGF

SEQ ID NO: 58 - protein, 98 aa, Artificial Sequence
  Synthetic: SteA scaffold(SUM) amino acid sequence
MIPGGLSEAKPATPEIQEIVDKVKPQLEEKTNETYGKLEAVQYKTQVLASTNYYIKVRAGDNKYMHLKVFKSLPGQNEDLVLTGYQVDKNKDDELTGF

SEQ ID NO: 59 - protein, 98 aa, Artificial Sequence
  Synthetic: SteA scaffold(SUN) amino acid sequence
MIPRGLSEAKPATPEIQEIVDKVKPQLEEKTNETYGKLEAVQYKTQVVAGTNYYIKVRAGDNKYMHLKVFKSLPGQNEDLVLTGYQVDKNKDDELTGF

SEQ ID NO: 60 - protein, 83 aa, Artificial Sequence
  Synthetic: SteA scaffold(SDM-) amino acid sequence
MIPGGLSEAKPATPEIQEIVDKVKPQLEEKTNETYGKLEAVQYKTQVLASTNYYIKVRAGDNKYMHLKVFNGPPGQNEDLVRS

SEQ ID NO: 61 - protein, 73 aa, Artificial Sequence
  Synthetic: SteA scaffold(SDM--) amino acid sequence
MIPGGLSEAKPATPEIQEIVDKVKPQLEEKTNETYGKLEAVQYKTQVLASTNYYIKVRAGDNKYMHLKVFNGP

SEQ ID NO: 62 - protein, 83 aa, Artificial Sequence
  Synthetic: SteA scaffold(SQM-) amino acid sequence
MIPRGLSEAKPATPEIQEIVDKVKPQLEEKTNETYGKLEAVQYKTQVLASTNYYIKVRAGDNKYMHLKVFNGPPGQNEDLVRS

SEQ ID NO: 63 - protein, 73 aa, Artificial Sequence
  Synthetic: SteA scaffold(SQM--) amino acid sequence
MIPRGLSEAKPATPEIQEIVDKVKPQLEEKTNETYGKLEAVQYKTQVLASTNYYIKVRAGDNKYMHLKVFNGP

SEQ ID NO: 64 - protein, 83 aa, Artificial Sequence
  Synthetic: SteA scaffold(SUC-) amino acid sequence
MIPGGLSEAKPATPEIQEIVDKVKPQLEEKTNETYGKLEAVQYKTQVVAGTNYYIKVRAGDNKYMHLKVFNGPPGQNEDLVRS

SEQ ID NO: 65 - protein, 73 aa, Artificial Sequence
  Synthetic: SteA scaffold(SUC--) amino acid sequence
MIPGGLSEAKPATPEIQEIVDKVKPQLEEKTNETYGKLEAVQYKTQVVAGTNYYIKVRAGDNKYMHLKVFNGP

SEQ ID NO: 66 - protein, 83 aa, Artificial Sequence
  Synthetic: SteA scaffold(SUM-) amino acid sequence
MIPGGLSEAKPATPEIQEIVDKVKPQLEEKTNETYGKLEAVQYKTQVLASTNYYIKVRAGDNKYMHLKVFKSLPGQNEDLVLT

SEQ ID NO: 67 - protein, 73 aa, Artificial Sequence
  Synthetic: SteA scaffold(SUM--) amino acid sequence
MIPGGLSEAKPATPEIQEIVDKVKPQLEEKTNETYGKLEAVQYKTQVLASTNYYIKVRAGDNKYMHLKVFKSL

SEQ ID NO: 68 - protein, 83 aa, Artificial Sequence
  Synthetic: SteA scaffold(SUN-) amino acid sequence
MIPRGLSEAKPATPEIQEIVDKVKPQLEEKTNETYGKLEAVQYKTQVVAGTNYYIKVRAGDNKYMHLKVFKSLPGQNEDLVLT

SEQ ID NO: 69 - protein, 73 aa, Artificial Sequence
  Synthetic: SteA scaffold(SUN--) amino acid sequence
MIPRGLSEAKPATPEIQEIVDKVKPQLEEKTNETYGKLEAVQYKTQVVAGTNYYIKVRAGDNKYMHLKVFKSL

SEQ ID NO: 70 - protein, 98 aa, Artificial Sequence
  Synthetic: SteA scaffold(SQT) amino acid sequence
MIPRGLSEAKPATPEIQEIVDKVKPQLEEKTNETYGKLEAVQYKTQVLASTNYYIKVRAGDNKYMHLKVFNGPPGQNADRVLTGYQVDKNKDDELTGF

SEQ ID NO: 71 - protein, 100 aa, Artificial Sequence
  Synthetic: SteA scaffold(SQL) amino acid sequence
MIPRGLSEAKPATPEIQEIVDKVKPQLEEKTNETYGKLEAVQYKTQVLALASTNYYIKVRAGDNKYMHLKVFNGPPGQNADRVLTGYQVDKNKDDELTGF

SEQ ID NO: 72 - DNA, 92 bp, Artificial Sequence
  Synthetic: 5 UTR
tcaagcttttggaccctcgtacagaagctaatacgactcactatagggaaataagagagaaaagaagagtaagaagaaatataagagccacc

SEQ ID NO: 73 - DNA, 119 bp, Artificial Sequence
  Synthetic: 3 UTR
tgataataggctggagcctcggtggccatgcttcttgccccttgggcctccccccagcccctcctccccttcctgcacccgtacccccgtggtctttgaataaagtctgagtgggcggc

SEQ ID NO: 74 - DNA, 372 bp, Artificial Sequence
  Synthetic: SQT-PUMA-BH3 mRNA sequence without epitope tag
atgatcccaagagaagaacagtgggcacgcgaaattggagctcaactcagacggatggccgacgacctgaacgcccagtacgagcggcggggactctcagaagcgaagcctgccacccccgaaatccaggaaatcgtcgacaaggtcaagccgcagcttgaggaaaagaccaacgagacttacggaaaactggaggccgtgcagtataagacccaagtgttggcctccaccaactactacattaaggtccgcgccggcgataacaagtacatgcacctgaaggtgttcaatggtcctccgggacagaacgcggacagggtgctgactggctaccaagtggacaagaacaaggacgacgagctgacgggcttc

SEQ ID NO: 75 - DNA, 372 bp, Artificial Sequence
  Synthetic: SQT-BIM-BH3 mRNA sequence without epitope tag
atgatcccaagagacatgcgccccgaaatttggatcgcccaggagctcagacgcatcggagatgaattcaacgcatactacgctcggcggggactctcagaagcgaagcctgccacccccgaaatccaggaaatcgtcgacaaggtcaagccgcagcttgaggaaaagaccaacgagacttacggaaaactggaggccgtgcagtataagacccaagtgttggcctccaccaactactacattaaggtccgcgccggcgataacaagtacatgcacctgaaggtgttcaatggtcctccgggacagaacgcggacagggtgctgactggctaccaagtggacaagaacaaggacgacgagctgacgggcttc

SEQ ID NO: 76 - DNA, 372 bp, Artificial Sequence
  Synthetic: SQT-BAD-BH3 mRNA sequence without epitope tag
atgatcccaagaaacctgtgggctgcacaacgctacggaagagaactgcgccggatgagcgacgaatttgtggactcgttcaagaaggggggactctcagaagcgaagcctgccacccccgaaatccaggaaatcgtcgacaaggtcaagccgcagcttgaggaaaagaccaacgagacttacggaaaactggaggccgtgcagtataagacccaagtgttggcctccaccaactactacattaaggtccgcgccggcgataacaagtacatgcacctgaaggtgttcaatggtcctccgggacagaacgcggacagggtgctgactggctaccaagtggacaagaacaaggacgacgagctgacgggcttc

SEQ ID NO: 77 - DNA, 372 bp, Artificial Sequence
  Synthetic: SQT-NoxA-BH3 mRNA sequence without epitope tag
atgatcccaagacccgcagagctcgaagtggaatgcgctacccaacttagacggttcggagacaagctgaactttcggcagaagctcctgggactctcagaagcgaagcctgccacccccgaaatccaggaaatcgtcgacaaggtcaagccgcagcttgaggaaaagaccaacgagacttacggaaaactggaggccgtgcagtataagacccaagtgttggcctccaccaactactacattaaggtccgcgccggcgataacaagtacatgcacctgaaggtgttcaatggtcctccgggacagaacgcggacagggtgctgactggctaccaagtggacaagaacaaggacgacgagctgacgggcttc

SEQ ID NO: 78 - DNA, 606 bp, Artificial Sequence
  Synthetic: Bcl-w wild-type mRNA sequence with V5 epitope tag
atgattcctaatcctctcttagggctggacgcaacacccgcgtccgcacccgatacaagagcactggttgcagacttcgtgggctacaaactgaggcagaaggggtacgtctgtggtgcgggccccggtgaagggcctgccgccgaccctctgcaccaggctatgcgagctgcaggggacgagtttgagacacgctttagacgtacattttctgatttggcggctcagctccacgtcacccctgggagcgctcagcagcgatttacccaagtaagcgacgagctctttcaaggaggccccaattggggccggctggtcgcgttctttgtgtttggggccgcattatgcgcggaaagcgttaacaaagagatggaacccttagtaggacaagtccaggaatggatggtggcctacctagagacacagctagctgactggattcattcatcagggggctgggccgagtttactgccttatatggggatggggcactcgaagaagccaggagacttcgcgaagggaattgggcatcagtgaggactgtgctaactggagccgtcgccctgggtgccctggttaccgtgggtgctttctttgcgtctaaa

SEQ ID NO: 79 - DNA, 726 bp, Artificial Sequence
  Synthetic: Bcl-xL wild-type mRNA sequence with V5 epitope tag
atgattcctaaccccctactaggacttgactctcagagcaacagagaattggtagtggattttctgagttataaactatcgcagaaaggctactcttggtcacagttctcagatgttgaggagaacaggactgaagcaccagaggggacagagtctgagatggagacccccagtgctataaacggtaacccctcctggcacctagccgatagccccgccgtgaacggagccaccggacacagcagctccttagatgcccgcgaggtgattccgatggccgcagtaaagcaggctctccgagaagccggcgatgaatttgagcttaggtataggagggccttctctgatcttacttcacagcttcacatcacacctggcacagcttatcagagcttcgaacaggtggtgaatgaactttttcgagatggcgtaaactggggccgcatcgtggccttctttagcttcggtggggccctgtgcgtcgaatcagtggacaaagaaatgcaagtcctggtgagccgaatcgcagcctggatggccacgtacttgaacgatcacctggagccttggatccaagagaacggcggatgggacactttcgtcgagttgtatggcaataatgccgctgccgaaagtcggaaagggcaggagcgatttaaccgctggttccttacaggcatgactgttgctggggtggtgctcttgggttctctcttcagccgcaaa

SEQ ID NO: 80 - DNA, 513 bp, Artificial Sequence
  Synthetic: Mcl-1 del.N/C mRNA sequence with FLAG epitope tag
atgggaccactcgggtcggaggatgacctgtatcgccaatccctggaaatcatctctaggtacctgagggagcaggccaccggctcgaaagatagtaaaccacttggcgaagccggagctgctggcagaagggctctcgagacactccggcgcgtgggtgatggagtgcaacgcaatcacgagactgccttccagggcatgctcaggaagctggatatcaaaaacgaggatgatgttaagagtctctctcgagtcatgattcatgtgttttccgacggtgtcactaactggggtagaattgttactctgataagttttggagcattcgttgccaagcacttgaagacaattaaccaggagtcgtgcatcgagcccctagcggaaagcatcacagatgttctcgtgcgaaccaagcgcgattggctggtcaagcagaggggatgggacgggtttgttgagtttttccacgtcgaggatctggaagggggggactacaaggatgatgacgacaag

SEQ ID NO: 81 - DNA, 606 bp, Artificial Sequence
  Synthetic: Bcl-w(C29S/A128E)BH3 mRNA sequence with V5 epitope tag
atgattcccaatccgctcctcgggcttgacgctacaccagccagtgcaccagacacgagggcgctggttgccgatttcgtgggatacaagctcaggcaaaaagggtacgtaagcggtgccgggcccggggagggaccggctgccgatccactccaccaggctatgagggcagctggggacgaattcgaaacacgctttcggcggactttctccgaccttgccgcacagctacacgtcactcccgggagcgctcagcagcgcttcacgcaggtctcagacgaattgttccaaggcggccctaattggggaagattggtggccttcttcgtgtttggggcagcactgtgcgctgagtccgtgaacaaagaaatggaacccctcgttggccaagtccaagaatggatggtggaatatctggaaacacagttagcggattggattcactcatctgggggctgggctgagtttacagcactgtacggggacggtgccctagaggaggcccgaagactgagggaaggcaactgggccagcgttcgcacggtgttgaccggcgcggttgctttgggcgctttggttaccgtcggcgcattcttcgccagtaaa

SEQ ID NO: 82 - DNA, 645 bp, Artificial Sequence
  Synthetic: Bcl-2(D34A)del.C32 BH3 mRNA sequence with FLAG epitope tag
atggcacacgctggtaggacaggctacgacaaccgtgagattgtgatgaagtatattcactataagctgtctcaaagaggctacgaatgggatgcgggggccgtcggggctgccccacctggtgccgccccggctcctgggattttctcttcccagccgggacatacccctcatcctgccgcttctagggaccctgtggcaagaacatcccctctacagacccctgccgccccaggtgcggctgctggcccagcgttaagtcccgttccaccagtcgtgcaccttacccttaggcaagcgggcgacgatttctctaggcgataccggagggactttgccgaaatgtcatcacagctccatcttactccatttactgcccgtggcagattcgccaccgtagtggaagaactctttcgagacggcgtaaattgggggaggatcgtggcatttttcgaatttggaggggttatgtgtgtggagagcgtgaatcgggaaatgtctcctctggttgacaatattgccttgtggatgaccgaatatcttaacaggcacctccacacctggattcaagataatggtggatgggatgcgtttgtggaactttatgggccttcaatgcgtgactataaggacgacgacgacaaa

SEQ ID NO: 83 - DNA, 651 bp, Artificial Sequence
  Synthetic: Bcl-xL del.C24 mRNA sequence with FLAG epitope tag
atgtcccagagcaacagggaactcgtagtcgatttcttgtcctacaagctcagtcagaagggctactcttggtcccaattttccgacgtggaagaaaatcggacagaagcccctgagggaaccgagagtgagatggagaccccgtctgcaatcaacgggaacccttcttggcacttggccgacagtcccgctgtgaatggcgccacaggtcacagttcatcactcgacgctagagaagttatacccatggcagcagtcaagcaagctctgcgggaggccggcgacgagttcgaacttcggtaccgccgagctttttctgacctgactagtcagctgcatattactccgggcactgcgtaccagtcgttcgaacaggtggttaatgaactatttcgagacggcgtgaattggggcagaattgtagcctttttctcctttggaggtgcactgtgtgtcgagagcgtcgataaggaaatgcaggtgttggtgagccgtatcgcggcctggatggccacgtatctgaacgaccatttggaaccatggatccaagaaaacgggggttgggatactttcgtggagttatatggcaacaatgctgcagcggaaagtcgcaagggccaggaacgagactataaagatgacgacgataaa

SEQ ID NO: 84 - DNA, 501 bp, Artificial Sequence
  Synthetic: Mcl1 del.N/C(2010) mRNA sequence with FLAG epitope tag
atgggctctgatgagctgtaccggcagagcctcgagatcataagcagatacctgagggaacaagcgacgggggccaaggatactaagcccatgggacgctccggggcaacgtctcgcaaagccctcgagaccctcagaagggtcggcgatggggtacagcgcaaccacgagactgctttccagggcatgctccgaaagctggacatcaagaacgaagacgatgtgaagtctctttcccgtgtgatgatacatgtgttttctgatggggttaccaactggggacgcattgtgacccttattagcttcggggcgttcgtcgctaagcacctcaagacaatcaatcaggaaagttgtattgaacctttagctgagagcataactgacgtcttggtccgtacaaagagggattggttggtcaaacaacgtggttgggatggtttcgtagagttcttccatgtcgaagatcttgagggaggggactacaaagatgacgatgataaa

SEQ ID NO: 85 - DNA, 651 bp, Artificial Sequence
  Synthetic: Bcl-xL(D61A)del.C24 mRNA sequence with FLAG epitope tag
atgagccagtctaaccgcgaacttgttgtggacttccttagttataaactctctcagaaagggtattcttggagtcagttttctgatgttgaagaaaatcggactgaagctcccgaggggaccgaaagtgagatggagaccccaagcgcaataaatggcaacccatcttggcatctcgccgcctctcccgcagtaaacggagctaccggtcactcttctagcctggacgcccgggaggtgatacccatggcagccgttaagcaagccttgcgggaagcaggggatgagttcgaacttcgctacaggagggcattttctgacctcacctcccagttgcatattacgccagggacggcataccagagctttgagcaagtggtcaatgaactctttcgagacggagtcaactggggacgcattgtagccttcttttcatttgggggcgccctgtgtgtggagtctgtcgacaaggagatgcaggtgctcgtaagccgcatcgccgcctggatggcgacctatcttaatgatcacctagaaccttggatacaggagaatggcggatgggacaccttcgttgagctgtacggcaacaacgcggccgcagaaagccgcaagggtcaagagagggattataaagacgatgacgacaaa

SEQ ID NO: 86 - DNA, 396 bp, Artificial Sequence
  Synthetic: SQTanti-Mcl1.(L1)BimBH3.2A mRNA sequence with FLAG epitope tag
atgattcctcgagggctatcagaagctaagcctgccacaccagagattcaggagatcgtggacaaggtgaagccacaactcgaggagaaaaccaacgaaacatacggcaagctcgaagctgtccagtataaaactcaggtcttagatatgcgaccagaaatttggattgcccaggaagctcggcgcatcggtgacgaggctaatgcctattatgccagaagggcaagcactaattattatatcaaagtgcgagccggagataataaatacatgcacctcaaggtattcaacggaccccctgggcaaaacgctgacagagtcttaaccggatatcaggttgacaaaaataaggacgacgagcttaccggattcgattataaagatgatgacgacaaa

SEQ ID NO: 87 - DNA, 396 bp, Artificial Sequence
  Synthetic: SQTanti-Mcl1.(nt)BimBH3.2A mRNA sequence with FLAG epitope tag
atgatacctagggatatgaggcctgagatttggatagcacaggaggcacgtaggataggagatgaagccaatgcatactacgccaggcgcggtctgtcagaggccaaaccggcaacaccagagatccaagaaattgtcgataaagtcaagcctcagttagaggagaagactaatgagacgtatggcaagctcgaagcagtgcaatacaagactcaggtcctggcttccaccaattattatatcaaagtgcgcgccggcgacaacaagtacatgcaccttaaggtttttaacggccctccaggccagaatgctgaccgtgtgctgacaggttaccaggtcgacaagaataaggacgatgagttgaccggcttcgactataaggacgatgacgataaa

SEQ ID NO: 88 - DNA, 381 bp, Artificial Sequence
  Synthetic: SQT.(L1)Mcl1.BH3 mRNA sequence with FLAG epitope tag
atgattcctcgtggcctctctgaggccaagcctgccacccccgagatacaggaaatcgttgacaaagttaaacctcagctcgaggaaaagaccaacgagacttacggaaaacttgaggcagtgcagtataagactcaggtcctgaaagctctcgaaactctgagacgcgtgggggatggtgtccagcgtaatcacgagacggcctttgcaagcacaaattattacattaaggtgcgagccggcgataacaaatacatgcacctcaaagtgtttaatggaccgcccggccagaacgccgaccgcgtattgactgggtaccaggtagacaaaaacaaggatgacgaacttacagggttcgactacaaagatgatgacgataag

SEQ ID NO: 89 - DNA, 381 bp, Artificial Sequence
  Synthetic: SQT.(L2)Mcl1.BH3 mRNA sequence with FLAG epitope tag
atgataccccgggggctttcggaggcaaagccagctacccctgaaatccaagaaatcgtggataaggtgaaacctcagctggaggagaaaaccaacgaaacatacgggaaactggaggcagttcaatacaaaacacaggttttggccagcactaattattacatcaaagtgagagcgggcgacaataagtatatgcatttgaaggtgttcaacgggcctaaggctctcgagactctacggcgggtcggagacggcgtccagagaaaccacgagactgcattccctggccagaacgcagaccgtgtcctgactggctaccaggtcgataaaaacaaggacgatgagctgacgggattcgactataaggacgatgatgacaaa

SEQ ID NO: 90 - DNA, 474 bp, Artificial Sequence
  Synthetic: biSQTanti-Bcl/Mcl1.(nt)BimBH2.2A.(L2)Bad mRNA sequence with FLAG epitope tag
atgattccaagggacatgagaccagagatctggattgcacaggaggctaggcgcataggagatgaagcaaatgcgtattatgcacgacgcggtctttctgaagctaagcctgcgacgccggagattcaggagatagtggataaagttaaacctcaattagaggaaaagaccaatgagacctacggcaaactggaagccgtgcaatataaaactcaggttctggcctccactaactattatatcaaagtgagggcaggagacaacaagtacatgcacttaaaggtgttcaatgggcccaacctgtgggcggcccagcgctacggtcgcgagctacgaaggatgtctgacgagttcgttgacagcttcaagaaggggcctggacagaacgccgatagagtgttaacaggctatcaggtcgataaaaataaagatgacgagctaaccgggtttgattacaaagatgacgatgataag

SEQ ID NO: 91 - DNA, 396 bp, Artificial Sequence
  Synthetic: SQTanti-Mcl1.(L2)BimBH3.2A mRNA sequence with FLAG epitope tag
atgattcccagaggcttgagtgaggctaagcccgccacacctgagatccaggaaatcgtggacaaggtgaaaccccagctggaagaaaaaaccaacgagacctacggcaaactggaggctgtccagtacaaaactcaagtcctggcctcaaccaactactacattaaagttagagcaggcgataataaatacatgcaccttaaagtattcaacggtcctgacatgcgacctgagatttggatagcacaggaagcaagaaggattggggatgaagctaatgcatattacgcccgccgcccggggcagaatgctgaccgtgtgctgaccggttatcaggtagacaagaacaaagacgacgagctaacaggcttcgactacaaagacgatgatgataag

SEQ ID NO: 92 - DNA, 579 bp, Artificial Sequence
  Synthetic: Bcl-w wild-type mRNA sequence without epitope tag
atggcaacacccgcgtccgcacccgatacaagagcactggttgcagacttcgtgggctacaaactgaggcagaaggggtacgtctgtggtgcgggccccggtgaagggcctgccgccgaccctctgcaccaggctatgcgagctgcaggggacgagtttgagacacgctttagacgtacattttctgatttggcggctcagctccacgtcacccctgggagcgctcagcagcgatttacccaagtaagcgacgagctctttcaaggaggccccaattggggccggctggtcgcgttctttgtgtttggggccgcattatgcgcggaaagcgttaacaaagagatggaacccttagtaggacaagtccaggaatggatggtggcctacctagagacacagctagctgactggattcattcatcagggggctgggccgagtttactgccttatatggggatggggcactcgaagaagccaggagacttcgcgaagggaattgggcatcagtgaggactgtgctaactggagccgtcgccctgggtgccctggttaccgtgggtgctttctttgcgtctaaa

SEQ ID NO: 93 - DNA, 699 bp, Artificial Sequence
  Synthetic: Bcl-xL wild-type mRNA sequence without epitope tag
atgtctcagagcaacagagaattggtagtggattttctgagttataaactatcgcagaaaggctactcttggtcacagttctcagatgttgaggagaacaggactgaagcaccagaggggacagagtctgagatggagacccccagtgctataaacggtaacccctcctggcacctagccgatagccccgccgtgaacggagccaccggacacagcagctccttagatgcccgcgaggtgattccgatggccgcagtaaagcaggctctccgagaagccggcgatgaatttgagcttaggtataggagggccttctctgatcttacttcacagcttcacatcacacctggcacagcttatcagagcttcgaacaggtggtgaatgaactttttcgagatggcgtaaactggggccgcatcgtggccttctttagcttcggtggggccctgtgcgtcgaatcagtggacaaagaaatgcaagtcctggtgagccgaatcgcagcctggatggccacgtacttgaacgatcacctggagccttggatccaagagaacggcggatgggacactttcgtcgagttgtatggcaataatgccgctgccgaaagtcggaaagggcaggagcgatttaaccgctggttccttacaggcatgactgttgctggggtggtgctcttgggttctctcttcagccgcaaa

SEQ ID NO: 94 - DNA, 489 bp, Artificial Sequence
  Synthetic: Mcl-1 del.N/C mRNA sequence without epitope tag
atgggaccactcgggtcggaggatgacctgtatcgccaatccctggaaatcatctctaggtacctgagggagcaggccaccggctcgaaagatagtaaaccacttggcgaagccggagctgctggcagaagggctctcgagacactccggcgcgtgggtgatggagtgcaacgcaatcacgagactgccttccagggcatgctcaggaagctggatatcaaaaacgaggatgatgttaagagtctctctcgagtcatgattcatgtgttttccgacggtgtcactaactggggtagaattgttactctgataagttttggagcattcgttgccaagcacttgaagacaattaaccaggagtcgtgcatcgagcccctagcggaaagcatcacagatgttctcgtgcgaaccaagcgcgattggctggtcaagcagaggggatgggacgggtttgttgagtttttccacgtcgaggatctggaagggggg

SEQ ID NO: 95 - DNA, 579 bp, Artificial Sequence
  Synthetic: Bcl-w(C29S/A128E)BH3 mRNA sequence without epitope tag)
atggctacaccagccagtgcaccagacacgagggcgctggttgccgatttcgtgggatacaagctcaggcaaaaagggtacgtaagcggtgccgggcccggggagggaccggctgccgatccactccaccaggctatgagggcagctggggacgaattcgaaacacgctttcggcggactttctccgaccttgccgcacagctacacgtcactcccgggagcgctcagcagcgcttcacgcaggtctcagacgaattgttccaaggcggccctaattggggaagattggtggccttcttcgtgtttggggcagcactgtgcgctgagtccgtgaacaaagaaatggaacccctcgttggccaagtccaagaatggatggtggaatatctggaaacacagttagcggattggattcactcatctgggggctgggctgagtttacagcactgtacggggacggtgccctagaggaggcccgaagactgagggaaggcaactgggccagcgttcgcacggtgttgaccggcgcggttgctttgggcgctttggttaccgtcggcgcattcttcgccagtaaa

SEQ ID NO: 96 - DNA, 621 bp, Artificial Sequence
  Synthetic: Bcl-2(D34A)del.C32 BH3 mRNA sequence without epitope tag
atggcacacgctggtaggacaggctacgacaaccgtgagattgtgatgaagtatattcactataagctgtctcaaagaggctacgaatgggatgcgggggccgtcggggctgccccacctggtgccgccccggctcctgggattttctcttcccagccgggacatacccctcatcctgccgcttctagggaccctgtggcaagaacatcccctctacagacccctgccgccccaggtgcggctgctggcccagcgttaagtcccgttccaccagtcgtgcaccttacccttaggcaagcgggcgacgatttctctaggcgataccggagggactttgccgaaatgtcatcacagctccatcttactccatttactgcccgtggcagattcgccaccgtagtggaagaactctttcgagacggcgtaaattgggggaggatcgtggcatttttcgaatttggaggggttatgtgtgtggagagcgtgaatcgggaaatgtctcctctggttgacaatattgccttgtggatgaccgaatatcttaacaggcacctccacacctggattcaagataatggtggatgggatgcgtttgtggaactttatgggccttcaatgcgt

SEQ ID NO: 97 - DNA, 627 bp, Artificial Sequence
  Synthetic: Bcl-xL del.C24 mRNA sequence without epitope tag
atgtcccagagcaacagggaactcgtagtcgatttcttgtcctacaagctcagtcagaagggctactcttggtcccaattttccgacgtggaagaaaatcggacagaagcccctgagggaaccgagagtgagatggagaccccgtctgcaatcaacgggaacccttcttggcacttggccgacagtcccgctgtgaatggcgccacaggtcacagttcatcactcgacgctagagaagttatacccatggcagcagtcaagcaagctctgcgggaggccggcgacgagttcgaacttcggtaccgccgagctttttctgacctgactagtcagctgcatattactccgggcactgcgtaccagtcgttcgaacaggtggttaatgaactatttcgagacggcgtgaattggggcagaattgtagcctttttctcctttggaggtgcactgtgtgtcgagagcgtcgataaggaaatgcaggtgttggtgagccgtatcgcggcctggatggccacgtatctgaacgaccatttggaaccatggatccaagaaaacgggggttgggatactttcgtggagttatatggcaacaatgctgcagcggaaagtcgcaagggccaggaacga

SEQ ID NO: 98 - DNA, 477 bp, Artificial Sequence
  Synthetic: Mcl1 del.N/C(2010) mRNA sequence without epitope tag
atgggctctgatgagctgtaccggcagagcctcgagatcataagcagatacctgagggaacaagcgacgggggccaaggatactaagcccatgggacgctccggggcaacgtctcgcaaagccctcgagaccctcagaagggtcggcgatggggtacagcgcaaccacgagactgctttccagggcatgctccgaaagctggacatcaagaacgaagacgatgtgaagtctctttcccgtgtgatgatacatgtgttttctgatggggttaccaactggggacgcattgtgacccttattagcttcggggcgttcgtcgctaagcacctcaagacaatcaatcaggaaagttgtattgaacctttagctgagagcataactgacgtcttggtccgtacaaagagggattggttggtcaaacaacgtggttgggatggtttcgtagagttcttccatgtcgaagatcttgagggaggg

SEQ ID NO: 99 - DNA, 627 bp, Artificial Sequence
  Synthetic: Bcl-xL(D61A)del.C24 mRNA sequence without epitope tag
atgagccagtctaaccgcgaacttgttgtggacttccttagttataaactctctcagaaagggtattcttggagtcagttttctgatgttgaagaaaatcggactgaagctcccgaggggaccgaaagtgagatggagaccccaagcgcaataaatggcaacccatcttggcatctcgccgcctctcccgcagtaaacggagctaccggtcactcttctagcctggacgcccgggaggtgatacccatggcagccgttaagcaagccttgcgggaagcaggggatgagttcgaacttcgctacaggagggcattttctgacctcacctcccagttgcatattacgccagggacggcataccagagctttgagcaagtggtcaatgaactctttcgagacggagtcaactggggacgcattgtagccttcttttcatttgggggcgccctgtgtgtggagtctgtcgacaaggagatgcaggtgctcgtaagccgcatcgccgcctggatggcgacctatcttaatgatcacctagaaccttggatacaggagaatggcggatgggacaccttcgttgagctgtacggcaacaacgcggccgcagaaagccgcaagggtcaagagagg

SEQ ID NO: 100 - DNA, 372 bp, Artificial Sequence
  Synthetic: SQTanti-Mcl1.(L1)BimBH3.2A mRNA sequence without epitope tag
atgattcctcgagggctatcagaagctaagcctgccacaccagagattcaggagatcgtggacaaggtgaagccacaactcgaggagaaaaccaacgaaacatacggcaagctcgaagctgtccagtataaaactcaggtcttagatatgcgaccagaaatttggattgcccaggaagctcggcgcatcggtgacgaggctaatgcctattatgccagaagggcaagcactaattattatatcaaagtgcgagccggagataataaatacatgcacctcaaggtattcaacggaccccctgggcaaaacgctgacagagtcttaaccggatatcaggttgacaaaaataaggacgacgagcttaccggattc

SEQ ID NO: 101 - DNA, 372 bp, Artificial Sequence
  Synthetic: SQTanti-Mcl1.(nt)BimBH3.2A mRNA sequence without epitope tag
atgatacctagggatatgaggcctgagatttggatagcacaggaggcacgtaggataggagatgaagccaatgcatactacgccaggcgcggtctgtcagaggccaaaccggcaacaccagagatccaagaaattgtcgataaagtcaagcctcagttagaggagaagactaatgagacgtatggcaagctcgaagcagtgcaatacaagactcaggtcctggcttccaccaattattatatcaaagtgcgcgccggcgacaacaagtacatgcaccttaaggtttttaacggccctccaggccagaatgctgaccgtgtgctgacaggttaccaggtcgacaagaataaggacgatgagttgaccggcttc

SEQ ID NO: 102 - DNA, 357 bp, Artificial Sequence
  Synthetic: SQT.(L1)Mcl1.BH3 mRNA sequence without epitope tag
atgattcctcgtggcctctctgaggccaagcctgccacccccgagatacaggaaatcgttgacaaagttaaacctcagctcgaggaaaagaccaacgagacttacggaaaacttgaggcagtgcagtataagactcaggtcctgaaagctctcgaaactctgagacgcgtgggggatggtgtccagcgtaatcacgagacggcctttgcaagcacaaattattacattaaggtgcgagccggcgataacaaatacatgcacctcaaagtgtttaatggaccgcccggccagaacgccgaccgcgtattgactgggtaccaggtagacaaaaacaaggatgacgaacttacagggttc

SEQ ID NO: 103 - DNA, 357 bp, Artificial Sequence
  Synthetic: SQT.(L2)Mcl1.BH3 mRNA sequence without epitope tag
atgataccccgggggctttcggaggcaaagccagctacccctgaaatccaagaaatcgtggataaggtgaaacctcagctggaggagaaaaccaacgaaacatacgggaaactggaggcagttcaatacaaaacacaggttttggccagcactaattattacatcaaagtgagagcgggcgacaataagtatatgcatttgaaggtgttcaacgggcctaaggctctcgagactctacggcgggtcggagacggcgtccagagaaaccacgagactgcattccctggccagaacgcagaccgtgtcctgactggctaccaggtcgataaaaacaaggacgatgagctgacgggattc

SEQ ID NO: 104 - DNA, 450 bp, Artificial Sequence
  Synthetic: biSQTanti-Bcl/Mcl1.(nt)BimBH2.2A.(L2)Bad mRNA sequence without epitope tag
atgattccaagggacatgagaccagagatctggattgcacaggaggctaggcgcataggagatgaagcaaatgcgtattatgcacgacgcggtctttctgaagctaagcctgcgacgccggagattcaggagatagtggataaagttaaacctcaattagaggaaaagaccaatgagacctacggcaaactggaagccgtgcaatataaaactcaggttctggcctccactaactattatatcaaagtgagggcaggagacaacaagtacatgcacttaaaggtgttcaatgggcccaacctgtgggcggcccagcgctacggtcgcgagctacgaaggatgtctgacgagttcgttgacagcttcaagaaggggcctggacagaacgccgatagagtgttaacaggctatcaggtcgataaaaataaagatgacgagctaaccgggttt

SEQ ID NO: 105 - DNA, 371 bp, Artificial Sequence
  Synthetic: SQTanti-Mcl1.(L2)BimBH3.2A mRNA sequence without epitope tag
atgattcccagaggcttgagtgaggctaagcccgccacacctgagatccaggaaatcgtggacaaggtgaaaccccagctggaagaaaaaaccaacgagacctacggcaaactggaggctgtccagtacaaaactcaagtcctggcctcaaccaactactacattaaagttagagcaggcgataataaatacatgcaccttaaagtattcaacggtcctgacatgcacctgagatttggatagcacaggaagcaagaaggattggggatgaagctaatgcatattacgcccgccgcccggggcagaatgctgaccgtgtgctgaccggttatcaggtagacaagaacaaagacgacgagctaacaggcttc

SEQ ID NO: 106 - RNA, 22 nt, Artificial Sequence
  Synthetic: miR-21 sequence
ucaacaucagucugauaagcua

SEQ ID NO: 107 - protein, 138 aa, Artificial Sequence
  Synthetic: SQTanti-Mcl1.(nt)BimBH3.2A.v5
MIPRDMRPEIWIAQEARRIGDEANAYYARRGLSEAKPATPEIQEIVDKVKPQLEEKTNETYGKLEAVQYKTQVLASTNYYIKVRAGDNKYMHLKVFNGPPGQNADRVLTGYQVDKNKDDELTGFGKPIPNPLLGLDST

SEQ ID NO: 108 - protein, 143 aa, Artificial Sequence
  Synthetic: BimBH3.2A(x3.F2A).v5_miR122
MDMRPEIWIAQEARRIGDEANAYYARRGSGVKQTLNFDLLKLAGDVESNPGPDMRPEIWIAQEARRIGDEANAYYARRGSGVKQTLNFDLLKLAGDVESNPGPDMRPEIWIAQEARRIGDEANAYYARRGKPIPNPLLGLDST

SEQ ID NO: 109 - protein, 133 aa, Artificial Sequence
  Synthetic: SQT.(nt)Mcl1.BH3.cv5
MIPRKALETLRRVGDGVQRNHETAFGLSEAKPATPEIQEIVDKVKPQLEEKTNETYGKLEAVQYKTQVLASTNYYIKVRAGDNKYMHLKVFNGPPGQNADRVLTGYQVDKNKDDELTGFGKPIPNPLLGLDST

SEQ ID NO: 110 - protein, 128 aa, Artificial Sequence
  Synthetic: Mcl1.BH3(x3.F2A).cV5
MKALETLRRVGDGVQRNHETAFGSGVKQTLNFDLLKLAGDVESNPGPKALETLRRVGDGVQRNHETAFGSGVKQTLNFDLLKLAGDVESNPGPKALETLRRVGDGVQRNHETAFGKPIPNPLLGLDST

SEQ ID NO: 111 - protein, 134 aa, Artificial Sequence
  Synthetic: antiMcl1.MS1(x3.F2A).cV5
MRPEIWMTQGLRRLGDEINAYYARGSGVKQTLNFDLLKLAGDVESNPGPRPEIWMTQGLRRLGDEINAYYARGSGVKQTLNFDLLKLAGDVESNPGPRPEIWMTQGLRRLGDEINAYYARGKPIPNPLLGLDST

SEQ ID NO: 112 - protein, 134 aa, Artificial Sequence
  Synthetic: antiMcl1.MS2(x3.F2A).cV5
MRPEIWLTQSLQRLGDEINAYYARGSGVKQTLNFDLLKLAGDVESNPGPRPEIWLTQSLQRLGDEINAYYARGSGVKQTLNFDLLKLAGDVESNPGPRPEIWLTQSLQRLGDEINAYYARGKPIPNPLLGLDST

SEQ ID NO: 113 - protein, 134 aa, Artificial Sequence
  Synthetic: antiMcl1.MS3(x3.F2A).cV5
MRPEIWLTQHLQRLGDEINAYYARGSGVKQTLNFDLLKLAGDVESNPGPRPEIWLTQHLQRLGDEINAYYARGSGVKQTLNFDLLKLAGDVESNPGPRPEIWLTQHLQRLGDEINAYYARGKPIPNPLLGLDST

SEQ ID NO: 114 - protein, 101 aa, Artificial Sequence
  Synthetic: antiMcl1.SB-02(x3.F2A).cV5
MDFSVLQTIGDSLGSGVKQTLNFDLLKLAGDVESNPGPDFSVLQTIGDSLGSGVKQTLNFDLLKLAGDVESNPGPDFSVLQTIGDSLGKPIPNPLLGLDST

SEQ ID NO: 115 - protein, 101 aa, Artificial Sequence
  Synthetic: antiMcl1.SB-03(x3.F2A).cV5
MNETVNTMLTYYYGSGVKQTLNFDLLKLAGDVESNPGPNETVNTMLTYYYGSGVKQTLNFDLLKLAGDVESNPGPNETVNTMLTYYYGKPIPNPLLGLDST

SEQ ID NO: 116 - protein, 101 aa, Artificial Sequence
  Synthetic: antiMcl1.SB-04(x3.F2A).cV5
MNETVELMQAYLHGSGVKQTLNFDLLKLAGDVESNPGPNETVELMQAYLHGSGVKQTLNFDLLKLAGDVESNPGPNETVELMQAYLHGKPIPNPLLGLDST

SEQ ID NO: 117 - protein, 124 aa, Artificial Sequence
  Synthetic: SQTanti-Mcl1.(nt)BimBH3.2A without v5 tag
MIPRDMRPEIWIAQEARRIGDEANAYYARRGLSEAKPATPEIQEIVDKVKPQLEEKTNETYGKLEAVQYKTQVLASTNYYIKVRAGDNKYMHLKVFNGPPGQNADRVLTGYQVDKNKDDELTGF

SEQ ID NO: 118 - protein, 129 aa, Artificial Sequence
  Synthetic: BimBH3.2A(x3.F2A)_miR122 without v5 tag)
MDMRPEIWIAQEARRIGDEANAYYARRGSGVKQTLNFDLLKLAGDVESNPGPDMRPEIWIAQEARRIGDEANAYYARRGSGVKQTLNFDLLKLAGDVESNPGPDMRPEIWIAQEARRIGDEANAYYARR

SEQ ID NO: 119 - protein, 119 aa, Artificial Sequence
  Synthetic: SQT.(nt)Mcl1.BH3 without v5 tag)
MIPRKALETLRRVGDGVQRNHETAFGLSEAKPATPEIQEIVDKVKPQLEEKTNETYGKLEAVQYKTQVLASTNYYIKVRAGDNKYMHLKVFNGPPGQNADRVLTGYQVDKNKDDELTGF

SEQ ID NO: 120 - protein, 114 aa, Artificial Sequence
  Synthetic: Mcl1.BH3(x3.F2A) without v5 tag
MKALETLRRVGDGVQRNHETAFGSGVKQTLNFDLLKLAGDVESNPGPKALETLRRVGDGVQRNHETAFGSGVKQTLNFDLLKLAGDVESNPGPKALETLRRVGDGVQRNHETAF

SEQ ID NO: 121 - protein, 120 aa, Artificial Sequence
  Synthetic: antiMcl1.MS1(x3.F2A) without v5 tag)
MRPEIWMTQGLRRLGDEINAYYARGSGVKQTLNFDLLKLAGDVESNPGPRPEIWMTQGLRRLGDEINAYYARGSGVKQTLNFDLLKLAGDVESNPGPRPEIWMTQGLRRLGDEINAYYAR

SEQ ID NO: 122 - protein, 120 aa, Artificial Sequence
  Synthetic: antiMcl1.MS2(x3.F2A) without v5 tag)
MRPEIWLTQSLQRLGDEINAYYARGSGVKQTLNFDLLKLAGDVESNPGPRPEIWLTQSLQRLGDEINAYYARGSGVKQTLNFDLLKLAGDVESNPGPRPEIWLTQSLQRLGDEINAYYAR

SEQ ID NO: 123 - protein, 120 aa, Artificial Sequence
  Synthetic: antiMcl1.MS3(x3.F2A) without v5 tag)
MRPEIWLTQHLQRLGDEINAYYARGSGVKQTLNFDLLKLAGDVESNPGPRPEIWLTQHLQRLGDEINAYYARGSGVKQTLNFDLLKLAGDVESNPGPRPEIWLTQHLQRLGDEINAYYAR

SEQ ID NO: 124 - protein, 87 aa, Artificial Sequence
  Synthetic: antiMcl1.SB-02(x3.F2A) without v5 tag)
MDFSVLQTIGDSLGSGVKQTLNFDLLKLAGDVESNPGPDFSVLQTIGDSLGSGVKQTLNFDLLKLAGDVESNPGPDFSVLQTIGDSL

SEQ ID NO: 125 - protein, 87 aa, Artificial Sequence
  Synthetic: antiMcl1.SB-03(x3.F2A) without v5 tag)
MNETVNTMLTYYYGSGVKQTLNFDLLKLAGDVESNPGPNETVNTMLTYYYGSGVKQTLNFDLLKLAGDVESNPGPNETVNTMLTYYY

SEQ ID NO: 126 - protein, 87 aa, Artificial Sequence
  Synthetic: antiMcl1.SB-04(x3.F2A) without v5 tag)
MNETVELMQAYLHGSGVKQTLNFDLLKLAGDVESNPGPNETVELMQAYLHGSGVKQTLNFDLLKLAGDVESNPGPNETVELMQAYLH

SEQ ID NO: 127 - DNA, 414 bp, Artificial Sequence
  Synthetic: SQTanti-Mcl1.(nt)BimBH3.2A.v5
atgatcccaagagatatgcgccctgaaatctggattgcacaagaagcccggaggattggagatgaggcgaacgcctactacgcccggagaggcctgtcggaagctaaaccggccacccccgagatccaggagatcgtggataaggtcaagccccagcttgaagaaaagactaacgaaacctatgggaagctggaggccgtgcagtacaagactcaagtgctcgcgtccaccaactactacatcaaggtccgcgccggcgacaacaagtacatgcacttgaaagtgttcaatggcccgccgggacagaacgccgaccgggtgctgactggataccaggtcgacaagaacaaggacgacgagctgaccggattcgggaagcctattcccaaccctctcctgggtctggacagcacc

SEQ ID NO: 128 - DNA, 429 bp, Artificial Sequence
  Synthetic: BimBH3.2A(x3.F2A).v5_miR122)
atggacatgaggcccgagatttggatcgctcaggaagcacgcaggatcggcgacgaggccaacgcatactacgcccggcgcggctccggagtgaagcagaccctgaatttcgacttgctcaagctggccggcgacgtggaatcgaacccaggtcccgacatgcgccccgagatctggatcgcccaagaagcacggcggatcggagatgaggccaacgcctactatgcgcggagaggaagcggggtcaagcagactcttaacttcgacctcctgaaactggccggagatgtggagtcaaaccctggaccggacatgcggccggaaatctggattgctcaggaggcacgcagaatcggcgatgaagccaacgcgtactacgccagacgggggaagcctattccgaaccctctgctgggtctggactccacc

SEQ ID NO: 129 - DNA, 399 bp, Artificial Sequence
  Synthetic: SQT.(nt)Mcl1.BH3.cv5)
atgatccctaggaaggccctggagaccctgaggagagtgggcgacggagtgcagaggaaccacgagaccgccttcggcctgagcgaggcaaagccagcaacacccgagatccaggagatcgtggataaggtgaagccccagctggaggagaagaccaatgagacatacggcaagctggaggccgtgcagtataagacccaggtgctggcctccacaaactactatatcaaggtgcgggccggcgacaataagtacatgcacctgaaggtgttcaacggaccacctggacagaatgcagacagggtgctgaccggctatcaggtggataagaacaaggacgatgagctgacaggctttggcaagccaatccccaatcctctgctgggcctggattctaca

SEQ ID NO: 130 - DNA, 384 bp, Artificial Sequence
  Synthetic: Mcl1.BH3(x3.F2A).cV5)
atgaaggccctggagaccctgaggagagtgggcgacggcgtgcagaggaaccacgagaccgccttcggcagcggagtgaagcagacactgaactttgacctgctgaagctggcaggcgatgtggagtccaatccaggacctaaggccctggagacactgaggagggtgggcgatggagtgcagaggaatcatgaaaccgccttcggctctggcgtcaaacagacactgaacttcgacctgctgaagctggccggcgatgtggagagcaatccaggaccaaaggccctggagaccctgcgcagagtgggcgacggagtccagagaaaccacgagacagccttcggcaagcctatcccaaatcccctgctgggcctggatagcacc

SEQ ID NO: 131 - DNA, 402 bp, Artificial Sequence
  Synthetic: antiMcl1.MS1(x3.F2A).cV5)
atgaggcccgagatctggatgacccagggactgcggagactgggcgacgagatcaacgcctactatgcaaggggcagcggagtgaagcagacactgaacttcgacctgctgaagctggcaggcgatgtggagtccaatccaggacctcggccagaaatttggatgactcagggcctgaggcgcctgggcgatgagatcaatgcctactatgccagaggctctggcgtcaaacagacactgaactttgacctgctgaagctggccggcgatgtggagagcaatccaggacctaggccagaaatctggatgactcaggggttacggagactgggcgacgagatcaacgcgtactatgcccggggcaagcccatccctaatccactgctgggcctggatagcaca

SEQ ID NO: 132 - DNA, 402 bp, Artificial Sequence
  Synthetic: antiMcl1.MS2(x3.F2A).cV5
atgcggcccgagatctggctgacccagtccctgcagagactgggcgacgagatcaacgcctactatgccaggggctctggcgtgaagcagacactgaacttcgacctgctgaagctggcaggcgatgtggagagcaatccaggacctaggccagaaatttggctgactcagagcctgcagcggctgggcgatgagatcaatgcctactatgccagaggcagcggagtcaagcagacactgaactttgacctgctgaagctggccggcgatgtggagtctaatcccggccctaggccagaaatctggctgactcagtccctgcagcgcctgggcgacgagatcaacgcgtactatgcccggggcaagcccatccctaatccactgctgggcctggattccaca

SEQ ID NO: 133 - DNA, 402 bp, Artificial Sequence
  Synthetic: antiMcl1.MS3(x3.F2A).cV5)
atgcggcccgagatctggctgacccagcacctgcagagactgggcgacgagatcaacgcctactatgccaggggcagcggcgtgaagcagacactgaacttcgacctgctgaagctggcaggcgatgtggagtccaatccaggacctaggccagaaatttggctgactcagcacctgcagcggctgggcgatgagatcaatgcctactatgccagaggctctggagtcaagcagacactgaactttgacctgctgaagctggccggcgatgtggagagtaacccaggacctaggccagagatttggttaactcaacacctgcagcgcctgggcgacgagatcaacgcgtactatgcccggggcaagcccatccctaatccactgctgggcctggatagcaca

SEQ ID NO: 134 - DNA, 303 bp, Artificial Sequence
  Synthetic: antiMcl1.SB-02(x3.F2A).cV5)
atggacttctccgtgctgcagaccatcggcgatagcctgggctccggcgtgaagcagacactgaacttcgacctgctgaagctggcaggcgatgtggagtccaatccaggacctgacttttctgtgctgcagactattggcgattctctgggcagcggagtcaaacagacactgaactttgacctgctgaagctggccggcgatgtggagagcaatccaggccccgacttttccgtgctgcaaactattggcgattccctgggcaagcctatcccaaaccccctgctgggcctggacagcaca

SEQ ID NO: 135 - DNA, 303 bp, Artificial Sequence
  Synthetic: antiMcl1.SB-03(x3.F2A).cV5)
atgaacgagaccgtgaatacaatgctgacctactattacggcagcggcgtgaagcagacactgaacttcgacctgctgaagctggcaggcgatgtggagagcaacccaggacctaatgagacagtgaacaccatgctgacatattactatggctccggcgtgaagcagaccctgaactttgacctgctgaagctggccggcgatgtggagtctaatccaggccccaatgaaactgtcaacaccatgctgacttattattacggcaagcctatcccaaatcccctgctgggcctggacagcaca

SEQ ID NO: 136 - DNA, 303 bp, Artificial Sequence
  Synthetic: antiMcl1.SB-04(x3.F2A).cV5)
atgaacgagaccgtggagctgatgcaggcctacctgcacggcagcggcgtgaagcagacactgaatttcgacctgctgaagctggcaggcgatgtggagagcaacccaggacctaatgaaactgtcgaactgatgcaggcctatctgcacggctccggagtcaagcagacactgaactttgacctgctgaagctggccggcgatgtggagtctaacccaggccccaatgaaactgtcgagctgatgcaggcttacctgcacggcaagcctatcccaaatcccctgctgggcctggacagcaca

SEQ ID NO: 137 - protein, 26 aa, Artificial Sequence
  Synthetic: BimBH3.2A
DMRPEIWIAQEARRIGDEANAYYARR

SEQ ID NO: 138 - protein, 25 aa, Artificial Sequence
  Synthetic: F2A linker sequence
GSGVKQTLNFDLLKLAGDVESNPGP

SEQ ID NO: 139 - protein, 21 aa, Artificial Sequence
  Synthetic: T2A linker sequence
GSGEGRGSLLTCGDVEENPGP

SEQ ID NO: 140 - protein, 22 aa, Artificial Sequence
  Synthetic: P2A linker sequence
GSGATNFSLLKQAGDVEENPGP

SEQ ID NO: 141 - protein, 23 aa, Artificial Sequence
  Synthetic: E2A linker sequence
GSGQCTNYALLKLAGDVESNPGP

SEQ ID NO: 142 - protein, 27 aa, Artificial Sequence
  Synthetic: PumaBH3_HS3UPCRfree
MEEQWAREIGAQLRRMADDLNAQYERR

SEQ ID NO: 143 - protein, 33 aa, Artificial Sequence
  Synthetic: PumaBH3.nHIS_HS3UPCRfree
MHHHHHHEEQWAREIGAQLRRMADDLNAQYERR

SEQ ID NO: 144 - protein, 41 aa, Artificial Sequence
  Synthetic: PumaBH3.nV5_HS3UPCRfree
MGKPIPNPLLGLDSTEEQWAREIGAQLRRMADDLNAQYERR

SEQ ID NO: 145 - protein, 33 aa, Artificial Sequence
  Synthetic: PumaBH3.cHIS_HS3UPCRfree
MEEQWAREIGAQLRRMADDLNAQYERRHHHHHH

SEQ ID NO: 146 - protein, 143 aa, Artificial Sequence
  Synthetic: PumaBH3(x3.F2A).v5_Hs3UPCRfree
MEEQWAREIGAQLRRMADDLNAQYERRGSGVKQTLNFDLLKLAGDVESNPGPEEQWAREIGAQLRRMADDLNAQYERRGSGVKQTLNFDLLKLAGDVESNPGPEEQWAREIGAQLRRMADDLNAQYERRGKPIPNPLLGLDST

SEQ ID NO: 147 - protein, 41 aa, Artificial Sequence
  Synthetic: PumaBH3.cV5_HS3UPCRfree
MEEQWAREIGAQLRRMADDLNAQYERRGKPIPNPLLGLDST

SEQ ID NO: 148 - protein, 143 aa, Artificial Sequence; identical to SEQ ID NO: 146
  Synthetic: PumaBH3(x3.F2A).v5_miR142.3p_tp

SEQ ID NO: 149 - protein, 143 aa, Artificial Sequence; identical to SEQ ID NO: 146
  Synthetic: PumaBH3(x3.F2A).v5_miR122/142.3p_tp

SEQ ID NO: 150 - protein, 143 aa, Artificial Sequence; identical to SEQ ID NO: 146
  Synthetic: PumaBH3(x3.F2A).v5_tp

SEQ ID NO: 151 - protein, 143 aa, Artificial Sequence; identical to SEQ ID NO: 146
  Synthetic: PumaBH3(x3.F2A).v5_miR122_tp

SEQ ID NO: 152 - protein, 267 aa, Artificial Sequence
  Synthetic: (pumaBH3.F2A)^5_cV5,(pumaBH3.F2A)^5_cV5_DX
MEEQWAREIGAQLRRMADDLNAQYERRGSGVKQTLNFDLLKLAGDVESNPGPEEQWAREIGAQLRRMADDLNAQYERRGSGVKQTLNFDLKAGDVESNPGPEEQWAREIGAQLRRMADDNAQYERRGSGVKQTLNFDLLKLAGDVESNPGPEEQWAREIGAQLRRMADDLNAQYERRGSGVKQTLNFDLLKLAGDVESNPGPEEQWAREIGAQLRRMADDLNAQYERRGSGVKQTLNFDLLKLAGDVESNPGPGKPIPNPLLGLDST

SEQ ID NO: 153 - protein, 270 aa, Artificial Sequence
  Synthetic: (BimBH3.F2A)^5_cV5,(BimBH3.F2A)^5_cV5_DX
MDMRPEIWIAQELRRIGDEFNAYYARRGSGVKQTLNFDLLKLAGDVESNPGPDMRPEIWIAQELRRIGDEFNAYYARRGSGVKQTLNFDLLKLAGDVESNPGPDMRPEIWIAQELRRIGDEFNAYYARRGSGVKQTLNFDLLKLAGDVESNPGPDMRPEIWIAQELRRIGDEFNAYYARRGSGVKQTLNFDLLKLAGDVESNPGPDMRPEIWIAQELRRIGDEFNAYYARRGSGVKQTLNFDLLKLAGDVESNPGPGKPIPNPLLGLDST

SEQ ID NO: 154 - protein, 193 aa, Artificial Sequence
  Synthetic: (SuperPumaBH3.F2A)^3_cV5
MQWAREIGAQLRRIGDDLNAQYERRRQGSGVKQTLNFDLLKLAGDVESNPGPQWAREIGAQLRRIGDDLNAQYERRRQGSGVKQTLNFDLLKLAGDVESNPGPQWAREIGAQLRRIGDDLNAQYERRRQGSGVKQTLNFDLLKLAGDVESNPGPGSGVKQTLNFDLLKLAGDVESNPGPGKPIPNPLLGLDST

SEQ ID NO: 155 - protein, 264 aa, Artificial Sequence
  Synthetic: (SuperPumaBH3.F2A)^5_cV5
MQWAREIGAQLRRIGDDLNAQYERRRQGSVKQTLNFDLLKLAGDVESNPGPQWAREIGAQRRIGDDLNAQYERRRQGSGVKQTLNFDLLKLAGDVESNPGPQWAREIGAQLRRIGDDLNAQYERRRQGSGVKQTLNFDLLKLAGDVESNPGPQAREIGAQLRRIGDDLNAQYERRRQGSGVKQTNFDLLKLAGDVESNPGPQWAREIGAQLRRIGDLNAQYERRRQGSGVKQTLNFDLLKLAGDVENPGPGKPIPNPLLGLDST

SEQ ID NO: 156 - protein, 270 aa, Artificial Sequence
  Synthetic: (KittyCatBH3.F2A)^5_cV5,(KittyCatBH3.F2A)^5_cV5_DX
MQWAREIGAQERREADDENAQYERRRQGSGVKQTLNFDLLKLAGDVESNPGPQWAREIGAQERREADDENAQYERRRQGSGVKQTLNFDLLKLAGDVESNPGPQWAREIGAQERREADDENAQYERRRQGSGVKQTLNFDLLKLAGDVESNPGPQWAREIGAQERREADDENAQYERRRQGSGVKQTLNFDLLKLAGDVESNPGPQWAREIGAQERREADDENAQYERRRQGSGVKQTLNFDLLKLAGDVESNPGPGKPIPNPLLGLDST

SEQ ID NO: 157 - protein, 270 aa, Artificial Sequence; identical to SEQ ID NO: 156
  Synthetic: (KittyCatBH3.F2A)^5_cV5,(KittyCatBH3.F2A)^5_cV5_DX

SEQ ID NO: 158 - protein, 270 aa, Artificial Sequence
  Synthetic: (BadBH3.F2A)^5_cV5
MNLWAAQRYGRELRRMSDEFVDSFKKGGSGVKQTLNFDLLKLAGDVESNPGPNLWAAQRYGRELRRMSDEFVDSFKKGGSGVKQTLNFDLLKLAGDVESNPGPNLWAAQRYGRELRRMSDEFVDSFKKGGSGVKQTLNFDLLKLAGDVESNPGPNLWAAQRYGRELRRMSDEFVDSFKKGGSGVKQTLNFDLLKLAGDVESNPGPNLWAAQRYGRELRRMSDEFVDSFKKGGSGVKQTLNFDLLKLAGDVESNPGPGKPIPNPLLGLDST

SEQ ID NO: 159 - protein, 321 aa, Artificial Sequence
  Synthetic: (Noxa-F2A-BadBH3-F2A)^3_cV5
MPAELEVECATQLRRFGDKLNFRQKLLGSGVKQTLNFDLLKLAGDVESNPGPNLWAAQRYGRELRRMSDEFVDSFKKGGSGVKQTLNFDLLKLAGDVESNPGPPAELEVECATQLRRFGDKLNFRQKLLGSGVKQTLNFDLLKLAGDVESNPGPNLWAAQRYGRELRRMSDEFVDSFKKGGSGVKQTLNFDLLKLAGDVESNPGPPAELEVECATQLRRFGDKLNFRQKLLGSGVKQTLNFDLLKLAGDVESNPGPNLWAAQRYGRELRRMSDEFVDSFKKGGSGVKQTLNFDLLKLAGDVESNPGPGKPIPNPLLGLDST

SEQ ID NO: 160 - protein, 525 aa, Artificial Sequence
  Synthetic: (pumaBH3.F2A)^10_cV5,(pumaBH3.F2A)^10_cV5_DX
MEEQWAREIGAQLRRMADDLNAQYERRGSGVKQTLNFDLLKLAGDVESNPGPEEQWAREIGAQLRRMADDLNAQYERRGSGVKQTLNFDLLKLAGDVESNPGPEEQWAREIGAQLRRMADDLNAQYERRGSGVKQTLNFDLLKLAGDVESNPGPEEQWAREIGAQLRRMADDLNAQYERRGSGVKQTLNFDLLKLAGDVESNPGPEEQWAREIGAQLRRMADDLNAQYERRGSGVKQTLNFDLLKLAGDVESNPGPEEQWAREIGAQLRRMADDLNAQYERRGSGVKQTLNFDLLKLAGDVESNPGPEEQWAREIGAQLRRMADDLNAQYERRGSGVKQTLNFDLLKLAGDVESNPGPEEQWAREIGAQLRRMADDLNAQYERRGSGVKQTLNFDLLKLAGDVESNPGPEEQWAREIGAQLRRMADDLNAQYERRGSGVKQTLNFDLLKLAGDVESNPGPEEQWAREIGAQLRRMADDLNAQYERRGSGVKQTLNFDLLKLAGDVESNPGPGKPIPNPLLGLDST

SEQ ID NO: 161 - protein, 525 aa, Artificial Sequence
  Synthetic: (BimBH3.F2A)^10_cV5,(BimBH3.F2A)^10_cV5_DX
MDMRPEIWIAQELRRIGDEFNAYYARRGSGVKQTLNFDLLKLAGDVESNPGPDMRPEIWIAQELRRIGDEFNAYYARRGSGVKQTLNFDLLKLAGDVESNPGPDMRPEIWIAQELRRIGDEFNAYYARRGSGVKQTLNFDLLKLAGDVESNPGPDMRPEIWIAQELRRIGDEFNAYYARRGSGVKQTLNFDLLKLAGDVESNPGPDMRPEIWIAQELRRIGDEFNAYYARRGSGVKQTLNFDLLKLAGDVESNPGPDMRPEIWIAQELRRIGDEFNAYYARRGSGVKQTLNFDLLKLAGDVESNPGPDMRPEIWIAQELRRIGDEFNAYYARRGSGVKQTLNFDLLKLAGDVESNPGPDMRPEIWIAQELRRIGDEFNAYYARRGSGVKQTLNFDLLKLAGDVESNPGPDMRPEIWIAQELRRIGDEFNAYYARRGSGVKQTLNFDLLKLAGDVESNPGPDMRPEIWIAQELRRIGDEFNAYYARRGSGVKQTLNFDLLKLAGDVESNPGPGKPIPNPLLGLDST

SEQ ID NO: 162 - protein, 321 aa, Artificial Sequence
  Synthetic: (Puma-P2A-BimBH3-F2A)^3_cV5
MEEQWAREIGAQLRRMADDLNAQYERRGSGVKQTLNFDLLKLAGDVESNPGPDMRPEIWIAQELRRIGDEFNAYYARRGSGVKQTLNFDLLKLAGDVESNPGPEEQWAREIGAQLRRMADDLNAQYERRGSGVKQTLNFDLLKLAGDVESNPGPDMRPEIWIAQELRRIGDEFNAYYARRGSGVKQTLNFDLLKLAGDVESNPGPEEQWAREIGAQLRRMADDLNAQYERRGSGVKQTLNFDLLKLAGDVESNPGPDMRPEIWIAQELRRIGDEFNAYYARRGSGVKQTLNFDLLKLAGDVESNPGPGKPIPNPLLGLDST

SEQ ID NO: 163 - protein, 525 aa, Artificial Sequence
  Synthetic: (Puma-F2A-BimBH3-F2A)^5_cV5,(Puma-F2A-BimBH3F2A)^5_cV5_DX
MEEQWAREIGAQLRRMADDLNAQYERRGSGVKQTLNFDLLKLAGDVESNPGPDMRPEIWIAQELRRIGDEFNAYYARRGSGVKQTLNFDLLKLAGDVESNPGPEEQWAREIGAQLRRMADDLNAQYERRGSGVKQTLNFDLLKLAGDVESNPGPDMRPEIWIAQELRRIGDEFNAYYARRGSGVKQTLNFDLLKLAGDVESNPGPEEQWAREIGAQLRRMADDLNAQYERRGSGVKQTLNFDLLKLAGDVESNPGPDMRPEIWIAQELRRIGDEFNAYYARRGSGVKQTLNFDLLKLAGDVESNPGPEEQWAREIGAQLRRMADDLNAQYERRGSGVKQTLNFDLLKLAGDVESNPGPDMRPEIWIAQELRRIGDEFNAYYARRGSGVKQTLNFDLLKLAGDVESNPGPEEQWAREIGAQLRRMADDLNAQYERRGSGVKQTLNFDLLKLAGDVESNPGPDMRPEIWIAQELRRIGDEFNAYYARRGSGVKQTLNFDLLKLAGDVESNPGPGKPIPNPLLGLDST

SEQ ID NO: 164 - protein, 1033 aa, Artificial Sequence
  Synthetic: (Puma-F2A-BimBH3-F2A)^10_cV5
MEEQWAREIGAQLRRMADDLNAQYERRGSGVKQTLNFDLLKLAGDVESNPGPDMRPEIWIAQELRRIGDEFNAYYARRGSGVKQTLNFDLLKLAGDVESNPGPEEQWAREIGAQLRRMADDLNAQYERRGSGVKQTLNFDLLKLAGDVESNPGPDMRPEIWIAQELRRIGDEFNAYYARRGSGVKQTLNFDLLKLAGDVENPGPEEQWAREIGAQLRRMADDLNAQYERRGSGVKQTLNFDLLKLAGDVESNPGPDMRPEIWIAQERRIGDEFNAYYARRGSGVKQTLNFDLLKLAGDVESNPGPEEQWAREIGAQLRRMADDLNAQYERRGSGVKQTLNFDLLKLAGDVESNPGPDMRPEIWIAQELRRIGDEFNAYYARRGSGVKQTLNFDLLKLAGDVESNPGPEEQWAREIGAQLRRMADDLNAQYERRGSGVKQTLNFDLLKLAGDVESNPGPDMRPEIWIAQELRRIGDEFNAYYARRGSGVKQTLNFDLLKLAGDVESNPGPEEQWAREIGAQLRRMADDLNAQYERRGSGVKQTLNFDLLKLAGDVESNPGPDMRPEIWIAQELRRIGDEFNAYYARRGSGVKQTLNFDLLKLAGDVESNPGPEEQWAREIGAQLRRMADDLNAQYERRGSGVKQTLNFDLLKLAGDVESNPGPDMRPEIWIAQELRRIGDEFNAYYARRGSGVKQTLNFDLLKLAGDVESNPGPEEQWAREIGAQLRRMADDLNAQYERRGSGVKQTLNFDLLKLAGDVESNPGPDMRPEIWIAQELRRIGDEFNAYYARRGSGVKQTLNFDLLKLAGDVESNPGPEEQWAREIGAQLRRMADDLNAQYERRGSGVKQTLNFDLLKLAGDVESNPGPDMRPEIWIAQELRRIGDEFNAYYARRGSGVKQTLNFDLLKLAGDVESNPGPEEQWAREIGAQLRRMADDLNAQYERRGSGVKQTLNFDLLKLAGDVESNPGPDMRPEIWIAQELRRIGDEFNAYYARRGSGVKQTLNFDLLKLAGDVESNPGPGKPIPNPLLGLDST

SEQ ID NO: 165 - protein, 524 aa, Artificial Sequence
  Synthetic: (SuperPumaBH3.F2A)^10_cV5,(SuperPumaBH3.F2A)^10_cV5_DX
MQWAREIGAQLRRIGDDLNAQYERRRQGSGVKQTLNFDLLKLAGDVESNPGPQWAREIGAQLRRIGDDLNAQYERRRQGSGVKQTLNFDLLKLAGDVESNPGPQWAREIGAQLRRIGDDLNAQYERRRQGSGVKQTLNFDLLKLAGDVESNPGPQWAREIGAQLRRIGDDLNAQYERRRQGSGVKQTLNFDLLKLAGDESNPGPQWAREIGAQLRRIGDDLNAQYERRRQGSGVKQTLNFDLLKLAGDVESNPGPQWAREIGAQLRRIGDDLNAQYERRRQGSGVKQTLNFDLLKLAGDVESNPGPQWAREIGAQLRRIGDDLNAQYERRRQGSGVKQTLNFDLLKLAGDVESNPGPQWAREIGAQLRRIGDDLNAQYERRRQGSGVKQTLNFDLLKLAGDVESNPGPQWAREIGAQLRRIGDDLNAQYERRRQGSGVKQTLNFDLLKLAGDVESNPGPQWAREIGAQLRRIGDDLNAQYERRRQGSGVKQTLNFDLLKLAGDVESNPGPGKPIPNPLLGLDST

SEQ ID NO: 166 - protein, 576 aa, Artificial Sequence
  Synthetic: (KittyCatBH3.F2A)^10_cV5,(KittyCatBH3.F2A)^10_cV5_DX
MQWAREIGAQERREADDENAQYERRRQGSGVKQTLNFDLLKLAGDVESNPGPQWAREIGAQERREADDENAQYERRRQGSGVKQTLNFDLLKLAGDVESNPGPQWAREIGAQERREADDENAQYERRRQGSGVKQTLNFDLLKLAGDVESNPGPQWAREIGAQERREADDENAQYERRRQGSGVKQTLNFDLLKLAGDVESNPGPQWAREIGAQERREADDENAQYERRRQGSGVKQTLNFDLLKLAGDVESNPGPQWAREIGAQERREADDENAQYERRRQGSGVKQTLNFDLLKLAGDVESNPGPQWAREIGAQERREADDENAQYERRRQGSGVKQTLNFDLLKLAGDVESNPGPQWAREIGAQERREADDENAQYERRRQGSGVKQTLNFDLLKLAGDVESNPGPQWAREIGAQERREADDENAQYERRRQGSGVKQTLNFDLLKLAGDVESNPGPQWAREIGAQERREADDENAQYERRRQGSGVKQTLNFDLLKLAGDVESNPGPQWAREIGAQERREADDENAQYERRRQGSGVKQTLNFDLLKLAGDVESNPGPGKPIPNPLLGLDST

SEQ ID NO: 167 - protein, 575 aa, Artificial Sequence
  Synthetic: (KittyCatBH3.F2A)^10_cV5,(KittyCatBH3.F2A)^10_cV5_DX
MQWAREIGAQERREADDENAQYERRRQGSGVKQTLNFDLLKLAGDVESNPGPQWAREIGAQERREADDENAQYERRRQGSGVKQTLNFDLLKLAGDVESNPGPQWAREIGAQERREADDENAQYERRRQGSGVKQTLNFDLLKLAGDVESNPGPQWAREIGAQERREADDENAQYERRRQGSGVKQTLNFDLLKLAGDVESNPGPQWAREIGAQERREADDENAQYERRRQGSGVKQTLNFDLLKLAGDVESNPGPQWAREIGAQERREADDENAQYERRRQGSGVKQTLNFDLLKLAGDVESNPGPQWAREIGAQERREADDNAQYERRRQGSGVKQTLNFDLLKLAGDVESNPGPQWAREIGAQERREADDENAQYERRRQGSGVKQTLNFDLLKLAGDVESNPGPQWAREIGAQERREADDENAQYERRRQGSGVKQTLNFDLLKLAGDVESNPGPQWAREIGAQERREADDENAQYERRRQGSGVKQTLNFDLLKLAGDVESNPGPQWAREIGAQERREADDENAQYERRRQGSGVKQTLNFDLLKLAGDVESNPGPGKPIPNPLLGLDST

SEQ ID NO: 168 - protein, 321 aa, Artificial Sequence
  Synthetic: (NoxaBH3.F2A)^5_cV5,(NoxaBH3.F2A)^5_cV5_DX
MPAELEVECATQLRRFGDKLNFRQKLLGSGVKQTLNFDLLKLAGDVESNPGPPAELEVECATQLRRFGDKLNFRQKLLGSGVKQTLNFDLLKLAGDVESNPGPPAELEVECATQLRRFGDKLNFRQKLLGSGVKQTLNFDLLKLAGDVESNPGPPAELEVECATQLRRFGDKLNFRQKLLGSGVKQTLNFDLLKLAGDVESNPGPPAELEVECATQLRRFGDKLNFRQKLLGSGVKQTLNFDLLKLAGDVESNPGPPAELEVECATQLRRFGDKLNFRQKLLGSGVKQTLNFDLLKLAGDVESNPGPGKPIPNPLLGLDST

SEQ ID NO: 169 - protein, 576 aa, Artificial Sequence
  Synthetic: (NoxaBH3.F2A)^10_cV5,(NoxaBH3.F2A)^10_cV5_DX
MPAELEVECATQLRRFGDKLNFRQKLLGSGVKQTLNFDLLKLAGDVESNPGPPAELEVECATQLRRFGDKLNFRQKLLGSGVKQTLNFDLLKLAGDVESNPGPPAELEVECATQLRRFGDKLNFRQKLLGSGVKQTLNFDLLKLAGDVESNPGPPAELEVECATQLRRFGDKLNFRQKLLGSGVKQTLNFDLLKLAGDVESNPGPPAELEVECATQLRRFGDKLNFRQKLLGSGVKQTLNFDLLKLAGDVESNPGPPAELEVECATQLRRFGDKLNFRQKLLGSGVKQTLNFDLLKLAGDVESNPGPPAELEVECATQLRRFGDKLNFRQKLLGSGVKQTLNFDLLKLAGDVESNPGPPAELEVECATQLRRFGDKLNFRQKLLGSGVKQTLNFDLLKLAGDVESNPGPPAELEVECATQLRRFGDKLNFRQKLLGSGVKQTLNFDLLKLAGDVESNPGPPAELEVECATQLRRFGDKLNFRQKLLGSGVKQTLNFDLLKLAGDVESNPGPPAELEVECATQLRRFGDKLNFRQKLLGSGVKQTLNFDLLKLAGDVESNPGPGKPIPNPLLGLDST

SEQ ID NO: 170 - protein, 525 aa, Artificial Sequence
  Synthetic: (BadBH3.F2A)^10_cV5,(BadBH3.F2A)^10_cV5_DX
MNLWAAQRYGRELRRMSDEFVDSFKKGGSGVKQTLNFDLLKLAGDVESNPGPNLWAAQRYGRELRRMSDEFVDSFKKGGSGVKQTLNFDLLKLAGDVESNPGPNLWAAQRYGRELRRMSDEFVDSFKKGGSGVKQTLNFDLLKLAGDVESNPGPNLWAAQRYGRELRRMSDEFVDSFKKGGSGVKQTLNFDLLKLAGDVESNPGPNLWAAQRYGRELRRMSDEFVDSFKKGGSGVKQTLNFDLLKLAGDVESNPGPNLWAAQRYGRELRRMSDEFVDSFKKGGSGVKQTLNFDLLKLAGDVESNPGPNLWAAQRYGRELRRMSDEFVDSFKKGGSGVKQTLNFDLLKLAGDVESNPGPNLWAAQRYGRELRRMSDEFVDSFKKGGSGVKQTLNFDLLKLAGDVESNPGPNLWAAQRYGRELRRMSDEFVDSFKKGGSGVKQTLNFDLLKLAGDVESNPGPNLWAAQRYGRELRRMSDEFVDSFKKGGSGVKQTLNFDLLKLAGDVESNPGPGKPIPNPLLGLDST

SEQ ID NO: 171 - protein, 525 aa, Artificial Sequence
  Synthetic: (Noxa-F2A-BadBH3-F2A)^5_cV5,(Noxa-F2A-BadBH3-F2A)^5_cV5_DX
MPAELEVECATQLRRFGDKLNFRQKLLGSGVKQTLNFDLLKLAGDVESNPGPNLWAAQRYGRELRRMSDEFVDSFKKGGSGVKQTLNFDLLKLAGDVESNPGPPAELEVECATQLRRFGDKLNFRQKLLGSGVKQTLNFDLLKLAGDVESNPGPNLWAAQRYGRELRRMSDEFVDSFKKGGSGVKQTLNFDLLKLAGDVESNPGPPAELEVECATQLRRFGDKLNFRQKLLGSGVKQTLNFDLLKLAGDVESNPGPNLWAAQRYGRELRRMSDEFVDSFKKGGSGVKQTLNFDLLKLAGDVESNPGPPAELEVECATQLRRFGDKLNFRQKLLGSGVKQTLNFDLLKLAGDVESNPGPNLWAAQRYGRELRRMSDEFVDSFKKGGSGVKQTLNFDLLKLAGDVESNPGPPAELEVECATQLRRFGDKLNFRQKLLGSGVKQTLNFDLLKLAGDVESNPGPNLWAAQRYGRELRRMSDEFVDSFKKGGSGVKQTLNFDLLKLAGDVESNPGPGKPIPNPLLGLDST

SEQ ID NO: 172 - protein, 1034 aa, Artificial Sequence
  Synthetic: (Noxa-F2A-BadBH3-F2A)^10_cV5
MPAELEVECATQLRRFGDKLNFRQKLLGSGVKQTLNFDLLKLAGDVESNPGPNLWAAQRYGRELRRMSDEFVDSFKKGGSGVKQTLNFDLLKLAGDVESNPGPPAELEVECATQLRRFGDKLNFRQKLLGSGVKQTLNFDLLKLAGDVESNPGPNLWAAQRYGRELRRMSDEFVDSFKKGGSGVKQTLNFDLLKLAGDVESNGPPAELEVECATQLRRFGDKLNFRQKLLGSGVKQTLNFDLLKLAGDVESNPGPNLWAAQRYGRELRRMSDEFVDSFKKGGSGVKQTLNFDLLKLAGDVESNPGPPAELEVECATQLRRFGDKLNFRQKLLGSGVKQTLNFDLLKLAGDVESNPGPNLWAAQRYGRELRRMSDEFVDSFKKGGSGVKQTLNFDLLKLAGDVESNPGPPAELEVECATQLRRFGDKLNFRQKLLGSGVKQTLNFDLLKLAGDVESNPGPNLWAAQRYGRELRRMSDEFVDSFKKGGSGVKQTLNFDLLKLAGDVESNPGPPAELEVECATQLRRFGDKLNFRQKLLGSGVKQTLNFDLLKLAGDVESNPGPNLWAAQRYGRELRRMSDEFVDSFKKGGSGVKQTLNFDLLKLAGDVESNPGPPAELEVECATQLRRFGDKLNFRQKLLGSGVKQTLNFDLLKLAGDVESNPGPNLWAAQRYGRELRRMSDEFVDSFKKGGSGVKQTLNFDLLKLAGDVESNPGPPAELEVECATQLRRFGDKLNFRQKLLGSGVKQTLNFDLLKLAGDVESNPGPNLWAAQRYGRELRRMSDEFVDSFKKGGSGVKQTLNFDLLKLAGDVESNPGPPAELEVECATQLRRFGDKLNFRQKLLGSGVKQTLNFDLLKLAGDVESNPGPNLWAAQRYGRELRRMSDEFVDSFKKGGSGVKQTLNFDLLKLAGDVESNPGPPAELEVECATQLRRFGDKLNFRQKLLGSGVKQTLNFDLLKLAGDVESNPGPNLWAAQRYGRELRRMSDEFVDSFKKGGSGVKQTLNFDLLKLAGDVESNPGPGKPIPNPLLGLDST

SEQ ID NO: 173 - protein, 321 aa, Artificial Sequence; identical to SEQ ID NO: 162
  Synthetic: (Puma-F2A-BimBH3-F2A)^3_cV5_DX

SEQ ID NO: 174 - protein, 193 aa, Artificial Sequence; identical to SEQ ID NO: 154
  Synthetic: (SuperPumaBH3.F2A)^3_cV5_DNA2.0

SEQ ID NO: 175 - protein, 321 aa, Artificial Sequence; identical to SEQ ID NO: 162
  Synthetic: (Puma-F2A-BimBH3-F2A)^3_cV5_DX_DNA2.0

SEQ ID NO: 176 - protein, 270 aa, Artificial Sequence
  Synthetic: (SuperPumaBH3.F2A)^5_cV5_DNA2.0
MQWAREIGAQLRRIGDDLNAQYERRRQGSGVKQTLNFDLLKLAGDVESNPGPQWAREIGAQLRRIGDDLNAQYERRRQGSGVKQTLNFDLLKLAGDVESNPGPQWAREIGAQLRRIGDDLNAQYERRRQGSGVKQTLNFDLLKLAGDVESNPGPQWAREIGAQLRRIGDDLNAQYERRRQGSGVKQTLNFDLLKLAGDVESNPGPQWAREIGAQLRRIGDDLNAQYERRRQGSGVKQTLNFDLLKLAGDVESNPGPGKPIPNPLLGLDST

SEQ ID NO: 177 - protein, 270 aa, Artificial Sequence
  Synthetic: (pumaBH3.F2A)^5_cV5_DNA2.0
MEEQWAREIGAQLRRMADDLNAQYERRGSGVKQTLNFDLLKLAGDVESNPGPEEQWAREIGAQLRRMADDLNAQYERRGSGVKQTLNFDLLKLAGDVESNPGPEEQWAREIGAQLRRMADDLNAQYERRGSGVKQTLNFDLLKLAGDVESNPGPEEQWAREIGAQLRRMADDLNAQYERRGSGVKQTLNFDLLKLAGDVESNPGPEEQWAREIGAQLRRMADDLNAQYERRGSGVKQTLNFDLLKLAGDVESNPGPGKPIPNPLLGLDST

SEQ ID NO: 178 - protein, 270 aa, Artificial Sequence; identical to SEQ ID NO: 156
  Synthetic: (KittyCatBH3.F2A)^5_cV5_DNA2.0

SEQ ID NO: 179 - protein, 576 aa, Artificial Sequence; identical to SEQ ID NO: 166
  Synthetic: KittyCatBH3.F2A)^10_cV5_DNA2.0

SEQ ID NO: 180 - protein, 525 aa, Artificial Sequence; identical to SEQ ID NO: 160
  Synthetic: (pumaBH3.F2A)^10_cV5_DNA2.0

SEQ ID NO: 181 - protein, 525 aa, Artificial Sequence; identical to SEQ ID NO: 163
  Synthetic: (Puma-F2A-BimBH3-F2A)^5_cV5_DNA2.0

SEQ ID NO: 182 - protein, 525 aa, Artificial Sequence
  Synthetic: (SuperPumaBH3.F2A)^10_cV5_DNA2.0
MQWAREIGAQLRRIGDDLNAQYERRRQGSGVKQTLNFDLLKLAGDVESNPGPQWAREIGAQLRRIGDDLNAQYERRRQGSGVKQTLNFDLLKLAGDVESNPGPQWAREIGAQLRRIGDDLNAQYERRRQGSGVKQTLNFDLLKLAGDVESNPGPQWAREIGAQLRRIGDDLNAQYERRRQGSGVKQTLNFDLLKLAGDVESNPGPQWAREIGAQLRRIGDDLNAQYERRRQGSGVKQTLNFDLLKLAGDVESNPGPQWAREIGAQLRRIGDDLNAQYERRRQGSGVKQTLNFDLLKLAGDVESNPGPQWAREIGAQLRRIGDDLNAQYERRRQGSGVKQTLNFDLLKLAGDVESNPGPQWAREIGAQLRRIGDDLNAQYERRRQGSGVKQTLNFDLLKLAGDVESNPGPQWAREIGAQLRRIGDDLNAQYERRRQGSGVKQTLNFDLLKLAGDVESNPGPQWAREIGAQLRRIGDDLNAQYERRRQGSGVKQTLNFDLLKLAGDVESNPGPGKPIPNPLLGLDST

SEQ ID NO: 183 - protein, 168 aa, Artificial Sequence
  Synthetic: (KittyCatBH3.F2A)^3_cV5
MQWAREIGAQERREADDENAQYERRRQGSGVKQTLNFDLLKLAGDVESNPGPQWAREIGAQERREADDENAQYERRRQGSGVKQTLNFDLLKLAGDVESNPGPQWAREIGAQERREADDENAQYERRRQGSGVKQTLNFDLLKLAGDVESNPGPGKPIPNPLLGLDST

SEQ ID NO: 184 - protein, 162 aa, Artificial Sequence
  Synthetic: (KittyCatBH3.P2A)^3_cV5
MQWAREIGAQERREADDENAQYERRRQGSGATNFSLLKQAGDVEENPGPQWAREIGAQERREADDENAQYERRRQGSGATNFSLLKQAGDVEENPGPQWAREIGAQERREADDENAQYERRRQGSGVKQTLNFDLLKLAGDVESNPGPGKPIPNPLLGLDST

SEQ ID NO: 185 - protein, 137 aa, Artificial Sequence
  Synthetic: PumaBH3(x3.P2A).v5_miR122
MEEQWAREIGAQLRRMADDLNAQYERRGSGATNFSLLKQAGDVEENPGPEEQWAREIGAQLRRMADDLNAQYERRGSGATNFSLLKQAGDVEENPGPEEQWAREIGAQLRRMADDLNAQYERRGKPIPNPLLGLDST

SEQ ID NO: 186 - protein, 117 aa, Artificial Sequence
  Synthetic: (PUMA BH3.GGGSx3)x3.V5
MEEQWAREIGAQLRRMADDLNAQYERRGGGSGGGSGGGSEEQWAREIGAQLRRMADDLNAQYERRGGGSGGGSGGGSEEQWAREIGAQLRRMADDLNAQYERRGKPIPNPLLGLDST

SEQ ID NO: 187 - protein, 117 aa, Artificial Sequence; identical to SEQ ID NO: 186
  Synthetic: (PUMA BH3.GGGSx3)x3.V5_DX

SEQ ID NO: 188 - protein, 79 aa, Artificial Sequence
  Synthetic: PUMA BH3.GGGSx3.PUMA BH3.V5
MEEQWAREIGAQLRRMADDLNAQYERRGGGSGGGSGGGSEEQWAREIGAQLRRMADDLNAQYERRGKPIPNPLLGLDST

SEQ ID NO: 189 - protein, 137 aa, Artificial Sequence; identical to SEQ ID NO: 185
  Synthetic: PumaBH3(x3.P2A).v5_miR122

SEQ ID NO: 190 - protein, 27 aa, Artificial Sequence
  Synthetic: PumaBH3_HS3UPCRfree
MEEQWAREIGAQLRRMADDLNAQYERR

SEQ ID NO: 191 - protein, 27 aa, Artificial Sequence
  Synthetic: PumaBH3_HS3UPCRfree without His Tag
MEEQWAREIGAQLRRMADDLNAQYERR

SEQ ID NO: 192 - protein, 27 aa, Artificial Sequence
  Synthetic: PumaBH3_HS3UPCRfree without v5 tag
MEEQWAREIGAQLRRMADDLNAQYERR

SEQ ID NO: 193 - protein, 27 aa, Artificial Sequence
  Synthetic: PumaBH3_HS3UPCRfree without His tag
MEEQWAREIGAQLRRMADDLNAQYERR

SEQ ID NO: 194 - protein, 129 aa, Artificial Sequence
  Synthetic: PumaBH3(x3.F2A)_Hs3UPCRfree without v5 tag
MEEQWAREIGAQLRRMADDLNAQYERRGSGVKQTLNFDLLKLAGDVESNPGPEEQWAREIGAQLRRMADDLNAQYERRGSGVKQTLNFDLLKLAGDVESNPGPEEQWAREIGAQLRRMADDLNAQYERR

SEQ ID NO: 195 - protein, 27 aa, Artificial Sequence
  Synthetic: PumaBH3_HS3UPCRfree without the v5 tag
MEEQWAREIGAQLRRMADDLNAQYERR

SEQ ID NO: 196 - protein, 129 aa, Artificial Sequence; identical to SEQ ID NO: 194
  Synthetic: PumaBH3(x3.F2A)_miR142.3p_tp without the v5 tag

SEQ ID NO: 197 - protein, 129 aa, Artificial Sequence; identical to SEQ ID NO: 194
  Synthetic: PumaBH3(x3.F2A)_miR122/142.3p_tp without the v5 tag

SEQ ID NO: 198 - protein, 129 aa, Artificial Sequence; identical to SEQ ID NO: 194
  Synthetic: PumaBH3(x3.F2A)_tp without the v5 tag

SEQ ID NO: 199 - protein, 129 aa, Artificial Sequence; identical to SEQ ID NO: 194
  Synthetic: PumaBH3(x3.F2A)_miR122_tp without the v5 tag

SEQ ID NO: 200 - protein, 253 aa, Artificial Sequence
  Synthetic: (pumaBH3.F2A)^5,(pumaBH3.F2A)^5_DX without the v5 tag
MEEQWAREIGAQLRRMADDLNAQYERRGSGVKQTLNFDLLKLAGDVESNPGPEEQWAREIGAQLRRMADDLNAQYERRGSGVKQTLNFDLKAGDVESNPGPEEQWAREIGAQLRRMADDNAQYERRGSGVKQTLNFDLLKLAGDVESNPGPEEQWAREIGAQLRRMADDLNAQYERRGSGVKQTLNFDLLKLAGDVESNPGPEEQWAREIGAQLRRMADDLNAQYERRGSGVKQTLNFDLLKLAGDVESNPGP

SEQ ID NO: 201 - protein, 256 aa, Artificial Sequence
  Synthetic: (BimBH3.F2A)^5,(BimBH3.F2A)^5_DX without the v5 tag
MDMRPEIWIAQELRRIGDEFNAYYARRGSGVKQTLNFDLLKLAGDVESNPGPDMRPEIWIAQELRRIGDEFNAYYARRGSGVKQTLNFDLLKLAGDVESNPGPDMRPEIWIAQELRRIGDEFNAYYARRGSGVKQTLNFDLLKLAGDVESNPGPDMRPEIWIAQELRRIGDEFNAYYARRGSGVKQTLNFDLLKLAGDVESNPGPDMRPEIWIAQELRRIGDEFNAYYARRGSGVKQTLNFDLLKLAGDVESNPGP

SEQ ID NO: 202 - protein, 179 aa, Artificial Sequence
  Synthetic: (SuperPumaBH3.F2A)^3 without the v5 tag
MQWAREIGAQLRRIGDDLNAQYERRRQGSGVKQTLNFDLLKLAGDVESNPGPQWAREIGAQLRRIGDDLNAQYERRRQGSGVKQTLNFDLLKLAGDVESNPGPQWAREIGAQLRRIGDDLNAQYERRRQGSGVKQTLNFDLLKLAGDVESNPGPGSGVKQTLNFDLLKLAGDVESNPGP

SEQ ID NO: 203 - protein, 250 aa, Artificial Sequence
  Synthetic: (SuperPumaBH3.F2A)^5 without the v5 tag
MQWAREIGAQLRRIGDDLNAQYERRRQGSVKQTLNFDLLKLAGDVESNPGPQWAREIGAQRRIGDDLNAQYERRRQGSGVKQTLNFDLLKLAGDVESNPGPQWAREIGAQLRRIGDDLNAQYERRRQGSGVKQTLNFDLLKLAGDVESNPGPQAREIGAQLRRIGDDLNAQYERRRQGSGVKQTNFDLLKLAGDVESNPGPQWAREIGAQLRRIGDLNAQYERRRQGSGVKQTLNFDLLKLAGDVENPGP

SEQ ID NO: 204 - protein, 256 aa, Artificial Sequence
  Synthetic: (KittyCatBH3.F2A)^5,(KittyCatBH3.F2A)^5_DX without the v5 tag
MQWAREIGAQERREADDENAQYERRRQGSGVKQTLNFDLLKLAGDVESNPGPQWAREIGAQERREADDENAQYERRRQGSGVKQTLNFDLLKLAGDVESNPGPQWAREIGAQERREADDENAQYERRRQGSGVKQTLNFDLLKLAGDVESNPGPQWAREIGAQERREADDENAQYERRRQGSGVKQTLNFDLLKLAGDVESNPGPQWAREIGAQERREADDENAQYERRRQGSGVKQTLNFDLLKLAGDVESNPGP

SEQ ID NO: 205 - protein, 270 aa, Artificial Sequence; identical to SEQ ID NO: 156
  Synthetic: (KittyCatBH3.F2A)^5,(KittyCatBH3.F2A)^5_DX without the v5 tag

SEQ ID NO: 206 - protein, 256 aa, Artificial Sequence
  Synthetic: (BadBH3.F2A)^5 without the v5 tag
MNLWAAQRYGRELRRMSDEFVDSFKKGGSGVKQTLNFDLLKLAGDVESNPGPNLWAAQRYGRELRRMSDEFVDSFKKGGSGVKQTLNFDLLKLAGDVESNPGPNLWAAQRYGRELRRMSDEFVDSFKKGGSGVKQTLNFDLLKLAGDVESNPGPNLWAAQRYGRELRRMSDEFVDSFKKGGSGVKQTLNFDLLKLAGDVESNPGPNLWAAQRYGRELRRMSDEFVDSFKKGGSGVKQTLNFDLLKLAGDVESNPGP

SEQ ID NO: 207 - protein, 307 aa, Artificial Sequence
  Synthetic: (Noxa-F2A-BadBH3-F2A)^3 without the v5 tag
MPAELEVECATQLRRFGDKLNFRQKLLGSGVKQTLNFDLLKLAGDVESNPGPNLWAAQRYGRELRRMSDEFVDSFKKGGSGVKQTLNFDLLKLAGDVESNPGPPAELEVECATQLRRFGDKLNFRQKLLGSGVKQTLNFDLLKLAGDVESNPGPNLWAAQRYGRELRRMSDEFVDSFKKGGSGVKQTLNFDLLKLAGDVESNPGPPAELEVECATQLRRFGDKLNFRQKLLGSGVKQTLNFDLLKLAGDVESNPGPNLWAAQRYGRELRRMSDEFVDSFKKGGSGVKQTLNFDLLKLAGDVESNPGP

SEQ ID NO: 208 - protein, 511 aa, Artificial Sequence
  Synthetic: (pumaBH3.F2A)^10,(pumaBH3.F2A)^10_DX without the v5 tag
MEEQWAREIGAQLRRMADDLNAQYERRGSGVKQTLNFDLLKLAGDVESNPGPEEQWAREIGAQLRRMADDLNAQYERRGSGVKQTLNFDLLKLAGDVESNPGPEEQWAREIGAQLRRMADDLNAQYERRGSGVKQTLNFDLLKLAGDVESNPGPEEQWAREIGAQLRRMADDLNAQYERRGSGVKQTLNFDLLKLAGDVESNPGPEEQWAREIGAQLRRMADDLNAQYERRGSGVKQTLNFDLLKLAGDVESNPGPEEQWAREIGAQLRRMADDLNAQYERRGSGVKQTLNFDLLKLAGDVESNPGPEEQWAREIGAQLRRMADDLNAQYERRGSGVKQTLNFDLLKLAGDVESNPGPEEQWAREIGAQLRRMADDLNAQYERRGSGVKQTLNFDLLKLAGDVESNPGPEEQWAREIGAQLRRMADDLNAQYERRGSGVKQTLNFDLLKLAGDVESNPGPEEQWAREIGAQLRRMADDLNAQYERRGSGVKQTLNFDLLKLAGDVESNPGP

SEQ ID NO: 209 - protein, 511 aa, Artificial Sequence
  Synthetic: (BimBH3.F2A)^10,(BimBH3.F2A)^10_DX without the v5 tag
MDMRPEIWIAQELRRIGDEFNAYYARRGSGVKQTLNFDLLKLAGDVESNPGPDMRPEIWIAQELRRIGDEFNAYYARRGSGVKQTLNFDLLKLAGDVESNPGPDMRPEIWIAQELRRIGDEFNAYYARRGSGVKQTLNFDLLKLAGDVESNPGPDMRPEIWIAQELRRIGDEFNAYYARRGSGVKQTLNFDLLKLAGDVESNPGPDMRPEIWIAQELRRIGDEFNAYYARRGSGVKQTLNFDLLKLAGDVESNPGPDMRPEIWIAQELRRIGDEFNAYYARRGSGVKQTLNFDLLKLAGDVESNPGPDMRPEIWIAQELRRIGDEFNAYYARRGSGVKQTLNFDLLKLAGDVESNPGPDMRPEIWIAQELRRIGDEFNAYYARRGSGVKQTLNFDLLKLAGDVESNPGPDMRPEIWIAQELRRIGDEFNAYYARRGSGVKQTLNFDLLKLAGDVESNPGPDMRPEIWIAQELRRIGDEFNAYYARRGSGVKQTLNFDLLKLAGDVESNPGP

SEQ ID NO: 210 - protein, 307 aa, Artificial Sequence
  Synthetic: (Puma-P2A-BimBH3-F2A)^3 without the v5 tag
MEEQWAREIGAQLRRMADDLNAQYERRGSGVKQTLNFDLLKLAGDVESNPGPDMRPEIWIAQELRRIGDEFNAYYARRGSGVKQTLNFDLLKLAGDVESNPGPEEQWAREIGAQLRRMADDLNAQYERRGSGVKQTLNFDLLKLAGDVESNPGPDMRPEIWIAQELRRIGDEFNAYYARRGSGVKQTLNFDLLKLAGDVESNPGPEEQWAREIGAQLRRMADDLNAQYERRGSGVKQTLNFDLLKLAGDVESNPGPDMRPEIWIAQELRRIGDEFNAYYARRGSGVKQTLNFDLLKLAGDVESNPGP

SEQ ID NO: 211 - protein, 511 aa, Artificial Sequence
  Synthetic: (Puma-F2A-BimBH3-F2A)^5,(Puma-F2A-BimBH3F2A)^5_DX without the v5 tag
MEEQWAREIGAQLRRMADDLNAQYERRGSGVKQTLNFDLLKLAGDVESNPGPDMRPEIWIAQELRRIGDEFNAYYARRGSGVKQTLNFDLLKLAGDVESNPGPEEQWAREIGAQLRRMADDLNAQYERRGSGVKQTLNFDLLKLAGDVESNPGPDMRPEIWIAQELRRIGDEFNAYYARRGSGVKQTLNFDLLKLAGDVESNPGPEEQWAREIGAQLRRMADDLNAQYERRGSGVKQTLNFDLLKLAGDVESNPGPDMRPEIWIAQELRRIGDEFNAYYARRGSGVKQTLNFDLLKLAGDVESNPGPEEQWAREIGAQLRRMADDLNAQYERRGSGVKQTLNFDLLKLAGDVESNPGPDMRPEIWIAQELRRIGDEFNAYYARRGSGVKQTLNFDLLKLAGDVESNPGPEEQWAREIGAQLRRMADDLNAQYERRGSGVKQTLNFDLLKLAGDVESNPGPDMRPEIWIAQELRRIGDEFNAYYARRGSGVKQTLNFDLLKLAGDVESNPGP

SEQ ID NO: 212 - protein, 1019 aa, Artificial Sequence
  Synthetic: (Puma-F2A-BimBH3-F2A)^10 without the v5 tag
MEEQWAREIGAQLRRMADDLNAQYERRGSGVKQTLNFDLLKLAGDVESNPGPDMRPEIWIAQELRRIGDEFNAYYARRGSGVKQTLNFDLLKLAGDVESNPGPEEQWAREIGAQLRRMADDLNAQYERRGSGVKQTLNFDLLKLAGDVESNPGPDMRPEIWIAQELRRIGDEFNAYYARRGSGVKQTLNFDLLKLAGDVENPGPEEQWAREIGAQLRRMADDLNAQYERRGSGVKQTLNFDLLKLAGDVESNPGPDMRPEIWIAQERRIGDEFNAYYARRGSGVKQTLNFDLLKLAGDVESNPGPEEQWAREIGAQLRRMADDLNAQYERRGSGVKQTLNFDLLKLAGDVESNPGPDMRPEIWIAQELRRIGDEFNAYYARRGSGVKQTLNFDLLKLAGDVESNPGPEEQWAREIGAQLRRMADDLNAQYERRGSGVKQTLNFDLLKLAGDVESNPGPDMRPEIWIAQELRRIGDEFNAYYARRGSGVKQTLNFDLLKLAGDVESNPGPEEQWAREIGAQLRRMADDLNAQYERRGSGVKQTLNFDLLKLAGDVESNPGPDMRPEIWIAQELRRIGDEFNAYYARRGSGVKQTLNFDLLKLAGDVESNPGPEEQWAREIGAQLRRMADDLNAQYERRGSGVKQTLNFDLLKLAGDVESNPGPDMRPEIWIAQELRRIGDEFNAYYARRGSGVKQTLNFDLLKLAGDVESNPGPEEQWAREIGAQLRRMADDLNAQYERRGSGVKQTLNFDLLKLAGDVESNPGPDMRPEIWIAQELRRIGDEFNAYYARRGSGVKQTLNFDLLKLAGDVESNPGPEEQWAREIGAQLRRMADDLNAQYERRGSGVKQTLNFDLLKLAGDVESNPGPDMRPEIWIAQELRRIGDEFNAYYARRGSGVKQTLNFDLLKLAGDVESNPGPEEQWAREIGAQLRRMADDLNAQYERRGSGVKQTLNFDLLKLAGDVESNPGPDMRPEIWIAQELRRIGDEFNAYYARRGSGVKQTLNFDLLKLAGDVESNPGP

SEQ ID NO: 213 - protein, 510 aa, Artificial Sequence
  Synthetic: (SuperPumaBH3.F2A)^10,(SuperPumaBH3.F2A)^10_DX without the v5 tag
MQWAREIGAQLRRIGDDLNAQYERRRQGSGVKQTLNFDLLKLAGDVESNPGPQWAREIGAQLRRIGDDLNAQYERRRQGSGVKQTLNFDLLKLAGDVESNPGPQWAREIGAQLRRIGDDLNAQYERRRQGSGVKQTLNFDLLKLAGDVESNPGPQWAREIGAQLRRIGDDLNAQYERRRQGSGVKQTLNFDLLKLAGDESNPGPQWAREIGAQLRRIGDDLNAQYERRRQGSGVKQTLNFDLLKLAGDVESNPGPQWAREIGAQLRRIGDDLNAQYERRRQGSGVKQTLNFDLLKLAGDVESNPGPQWAREIGAQLRRIGDDLNAQYERRRQGSGVKQTLNFDLLKLAGDVESNPGPQWAREIGAQLRRIGDDLNAQYERRRQGSGVKQTLNFDLLKLAGDVESNPGPQWAREIGAQLRRIGDDLNAQYERRRQGSGVKQTLNFDLLKLAGDVESNPGPQWAREIGAQLRRIGDDLNAQYERRRQGSGVKQTLNFDLLKLAGDVESNPGP

SEQ ID NO: 214 - protein, 562 aa, Artificial Sequence
  Synthetic: (KittyCatBH3.F2A)^10,(KittyCatBH3.F2A)^10_DX without the v5 tag
MQWAREIGAQERREADDENAQYERRRQGSGVKQTLNFDLLKLAGDVESNPGPQWAREIGAQERREADDENAQYERRRQGSGVKQTLNFDLLKLAGDVESNPGPQWAREIGAQERREADDENAQYERRRQGSGVKQTLNFDLLKLAGDVESNPGPQWAREIGAQERREADDENAQYERRRQGSGVKQTLNFDLLKLAGDVESNPGPQWAREIGAQERREADDENAQYERRRQGSGVKQTLNFDLLKLAGDVESNPGPQWAREIGAQERREADDENAQYERRRQGSGVKQTLNFDLLKLAGDVESNPGPQWAREIGAQERREADDENAQYERRRQGSGVKQTLNFDLLKLAGDVESNPGPQWAREIGAQERREADDENAQYERRRQGSGVKQTLNFDLLKLAGDVESNPGPQWAREIGAQERREADDENAQYERRRQGSGVKQTLNFDLLKLAGDVESNPGPQWAREIGAQERREADDENAQYERRRQGSGVKQTLNFDLLKLAGDVESNPGPQWAREIGAQERREADDENAQYERRRQGSGVKQTLNFDLLKLAGDVESNPGP

SEQ ID NO: 215 - protein, 561 aa, Artificial Sequence
  Synthetic: (KittyCatBH3.F2A)^10,(KittyCatBH3.F2A)^10_DX without the v5 tag
MQWAREIGAQERREADDENAQYERRRQGSGVKQTLNFDLLKLAGDVESNPGPQWAREIGAQERREADDENAQYERRRQGSGVKQTLNFDLLKLAGDVESNPGPQWAREIGAQERREADDENAQYERRRQGSGVKQTLNFDLLKLAGDVESNPGPQWAREIGAQERREADDENAQYERRRQGSGVKQTLNFDLLKLAGDVESNPGPQWAREIGAQERREADDENAQYERRRQGSGVKQTLNFDLLKLAGDVESNPGPQWAREIGAQERREADDENAQYERRRQGSGVKQTLNFDLLKLAGDVESNPGPQWAREIGAQERREADDNAQYERRRQGSGVKQTLNFDLLKLAGDVESNPGPQWAREIGAQERREADDENAQYERRRQGSGVKQTLNFDLLKLAGDVESNPGPQWAREIGAQERREADDENAQYERRRQGSGVKQTLNFDLLKLAGDVESNPGPQWAREIGAQERREADDENAQYERRRQGSGVKQTLNFDLLKLAGDVESNPGPQWAREIGAQERREADDENAQYERRRQGSGVKQTLNFDLLKLAGDVESNPGP

SEQ ID NO: 216 - protein, 307 aa, Artificial Sequence
  Synthetic: (NoxaBH3.F2A)^5,(NoxaBH3.F2A)^5_DX without the v5 tag
MPAELEVECATQLRRFGDKLNFRQKLLGSGVKQTLNFDLLKLAGDVESNPGPPAELEVECATQLRRFGDKLNFRQKLLGSGVKQTLNFDLLKLAGDVESNPGPPAELEVECATQLRRFGDKLNFRQKLLGSGVKQTLNFDLLKLAGDVESNPGPPAELEVECATQLRRFGDKLNFRQKLLGSGVKQTLNFDLLKLAGDVESNPGPPAELEVECATQLRRFGDKLNFRQKLLGSGVKQTLNFDLLKLAGDVESNPGPPAELEVECATQLRRFGDKLNFRQKLLGSGVKQTLNFDLLKLAGDVESNPGP

SEQ ID NO: 217 - protein, 562 aa, Artificial Sequence
  Synthetic: (NoxaBH3.F2A)^10,(NoxaBH3.F2A)^10_DX without the v5 tag
MPAELEVECATQLRRFGDKLNFRQKLLGSGVKQTLNFDLLKLAGDVESNPGPPAELEVECATQLRRFGDKLNFRQKLLGSGVKQTLNFDLLKLAGDVESNPGPPAELEVECATQLRRFGDKLNFRQKLLGSGVKQTLNFDLLKLAGDVESNPGPPAELEVECATQLRRFGDKLNFRQKLLGSGVKQTLNFDLLKLAGDVESNPGPPAELEVECATQLRRFGDKLNFRQKLLGSGVKQTLNFDLLKLAGDVESNPGPPAELEVECATQLRRFGDKLNFRQKLLGSGVKQTLNFDLLKLAGDVESNPGPPAELEVECATQLRRFGDKLNFRQKLLGSGVKQTLNFDLLKLAGDVESNPGPPAELEVECATQLRRFGDKLNFRQKLLGSGVKQTLNFDLLKLAGDVESNPGPPAELEVECATQLRRFGDKLNFRQKLLGSGVKQTLNFDLLKLAGDVESNPGPPAELEVECATQLRRFGDKLNFRQKLLGSGVKQTLNFDLLKLAGDVESNPGPPAELEVECATQLRRFGDKLNFRQKLLGSGVKQTLNFDLLKLAGDVESNPGP

SEQ ID NO: 218 - protein, 511 aa, Artificial Sequence
  Synthetic: (BadBH3.F2A)^10,(BadBH3.F2A)^10_DX without the v5 tag
MNLWAAQRYGRELRRMSDEFVDSFKKGGSGVKQTLNFDLLKLAGDVESNPGPNLWAAQRYGRELRRMSDEFVDSFKKGGSGVKQTLNFDLLKLAGDVESNPGPNLWAAQRYGRELRRMSDEFVDSFKKGGSGVKQTLNFDLLKLAGDVESNPGPNLWAAQRYGRELRRMSDEFVDSFKKGGSGVKQTLNFDLLKLAGDVESNPGPNLWAAQRYGRELRRMSDEFVDSFKKGGSGVKQTLNFDLLKLAGDVESNPGPNLWAAQRYGRELRRMSDEFVDSFKKGGSGVKQTLNFDLLKLAGDVESNPGPNLWAAQRYGRELRRMSDEFVDSFKKGGSGVKQTLNFDLLKLAGDVESNPGPNLWAAQRYGRELRRMSDEFVDSFKKGGSGVKQTLNFDLLKLAGDVESNPGPNLWAAQRYGRELRRMSDEFVDSFKKGGSGVKQTLNFDLLKLAGDVESNPGPNLWAAQRYGRELRRMSDEFVDSFKKGGSGVKQTLNFDLLKLAGDVESNPGP

SEQ ID NO: 219 - protein, 511 aa, Artificial Sequence
  Synthetic: (Noxa-F2A-BadBH3-F2A)^5,(Noxa-F2A-BadBH3-F2A)^5_DX without the v5 tag
MPAELEVECATQLRRFGDKLNFRQKLLGSGVKQTLNFDLLKLAGDVESNPGPNLWAAQRYGRELRRMSDEFVDSFKKGGSGVKQTLNFDLLKLAGDVESNPGPPAELEVECATQLRRFGDKLNFRQKLLGSGVKQTLNFDLLKLAGDVESNPGPNLWAAQRYGRELRRMSDEFVDSFKKGGSGVKQTLNFDLLKLAGDVESNPGPPAELEVECATQLRRFGDKLNFRQKLLGSGVKQTLNFDLLKLAGDVESNPGPNLWAAQRYGRELRRMSDEFVDSFKKGGSGVKQTLNFDLLKLAGDVESNPGPPAELEVECATQLRRFGDKLNFRQKLLGSGVKQTLNFDLLKLAGDVESNPGPNLWAAQRYGRELRRMSDEFVDSFKKGGSGVKQTLNFDLLKLAGDVESNPGPPAELEVECATQLRRFGDKLNFRQKLLGSGVKQTLNFDLLKLAGDVESNPGPNLWAAQRYGRELRRMSDEFVDSFKKGGSGVKQTLNFDLLKLAGDVESNPGP

SEQ ID NO: 220 - protein, 1020 aa, Artificial Sequence
  Synthetic: (Noxa-F2A-BadBH3-F2A)^10 without the v5 tag
MPAELEVECATQLRRFGDKLNFRQKLLGSGVKQTLNFDLLKLAGDVESNPGPNLWAAQRYGRELRRMSDEFVDSFKKGGSGVKQTLNFDLLKLAGDVESNPGPPAELEVECATQLRRFGDKLNFRQKLLGSGVKQTLNFDLLKLAGDVESNPGPNLWAAQRYGRELRRMSDEFVDSFKKGGSGVKQTLNFDLLKLAGDVESNGPPAELEVECATQLRRFGDKLNFRQKLLGSGVKQTLNFDLLKLAGDVESNPGPNLWAAQRYGRELRRMSDEFVDSFKKGGSGVKQTLNFDLLKLAGDVESNPGPPAELEVECATQLRRFGDKLNFRQKLLGSGVKQTLNFDLLKLAGDVESNPGPNLWAAQRYGRELRRMSDEFVDSFKKGGSGVKQTLNFDLLKLAGDVESNPGPPAELEVECATQLRRFGDKLNFRQKLLGSGVKQTLNFDLLKLAGDVESNPGPNLWAAQRYGRELRRMSDEFVDSFKKGGSGVKQTLNFDLLKLAGDVESNPGPPAELEVECATQLRRFGDKLNFRQKLLGSGVKQTLNFDLLKLAGDVESNPGPNLWAAQRYGRELRRMSDEFVDSFKKGGSGVKQTLNFDLLKLAGDVESNPGPPAELEVECATQLRRFGDKLNFRQKLLGSGVKQTLNFDLLKLAGDVESNPGPNLWAAQRYGRELRRMSDEFVDSFKKGGSGVKQTLNFDLLKLAGDVESNPGPPAELEVECATQLRRFGDKLNFRQKLLGSGVKQTLNFDLLKLAGDVESNPGPNLWAAQRYGRELRRMSDEFVDSFKKGGSGVKQTLNFDLLKLAGDVESNPGPPAELEVECATQLRRFGDKLNFRQKLLGSGVKQTLNFDLLKLAGDVESNPGPNLWAAQRYGRELRRMSDEFVDSFKKGGSGVKQTLNFDLLKLAGDVESNPGPPAELEVECATQLRRFGDKLNFRQKLLGSGVKQTLNFDLLKLAGDVESNPGPNLWAAQRYGRELRRMSDEFVDSFKKGGSGVKQTLNFDLLKLAGDVESNPGP

SEQ ID NO: 221 - protein, 307 aa, Artificial Sequence; identical to SEQ ID NO: 210
  Synthetic: (Puma-F2A-BimBH3-F2A)^3_DX without the v5 tag

SEQ ID NO: 222 - protein, 179 aa, Artificial Sequence; identical to SEQ ID NO: 202
  Synthetic: (SuperPumaBH3.F2A)^3_DNA2.0 without the v5 tag

SEQ ID NO: 223 - protein, 307 aa, Artificial Sequence; identical to SEQ ID NO: 210
  Synthetic: (Puma-F2A-BimBH3-F2A)^3_DX_DNA2.0 without the v5 tag

SEQ ID NO: 224 - protein, 256 aa, Artificial Sequence
  Synthetic: (SuperPumaBH3.F2A)^5_DNA2.0 without the v5 tag
MQWAREIGAQLRRIGDDLNAQYERRRQGSGVKQTLNFDLLKLAGDVESNPGPQWAREIGAQLRRIGDDLNAQYERRRQGSGVKQTLNFDLLKLAGDVESNPGPQWAREIGAQLRRIGDDLNAQYERRRQGSGVKQTLNFDLLKLAGDVESNPGPQWAREIGAQLRRIGDDLNAQYERRRQGSGVKQTLNFDLLKLAGDVESNPGPQWAREIGAQLRRIGDDLNAQYERRRQGSGVKQTLNFDLLKLAGDVESNPGP

SEQ ID NO: 225 - protein, 256 aa, Artificial Sequence
  Synthetic: (pumaBH3.F2A)^5_DNA2.0 without the v5 tag
MEEQWAREIGAQLRRMADDLNAQYERRGSGVKQTLNFDLLKLAGDVESNPGPEEQWAREIGAQLRRMADDLNAQYERRGSGVKQTLNFDLLKLAGDVESNPGPEEQWAREIGAQLRRMADDLNAQYERRGSGVKQTLNFDLLKLAGDVESNPGPEEQWAREIGAQLRRMADDLNAQYERRGSGVKQTLNFDLLKLAGDVESNPGPEEQWAREIGAQLRRMADDLNAQYERRGSGVKQTLNFDLLKLAGDVESNPGP

SEQ ID NO: 226 - protein, 256 aa, Artificial Sequence; identical to SEQ ID NO: 204
  Synthetic: (KittyCatBH3.F2A)^5_DNA2.0 without the v5 tag

SEQ ID NO: 227 - protein, 562 aa, Artificial Sequence; identical to SEQ ID NO: 214
  Synthetic: KittyCatBH3.F2A)^10_DNA2.0 without the v5 tag

SEQ ID NO: 228 - protein, 511 aa, Artificial Sequence; identical to SEQ ID NO: 208
  Synthetic: (pumaBH3.F2A)^10_DNA2.0 without the v5 tag

SEQ ID NO: 229 - protein, 511 aa, Artificial Sequence; identical to SEQ ID NO: 211
  Synthetic: (Puma-F2A-BimBH3-F2A)^5_DNA2.0 without the v5 tag

SEQ ID NO: 230 - protein, 511 aa, Artificial Sequence
  Synthetic: (SuperPumaBH3.F2A)^10_DNA2.0 without the v5 tag
MQWAREIGAQLRRIGDDLNAQYERRRQGSGVKQTLNFDLLKLAGDVESNPGPQWAREIGAQLRRIGDDLNAQYERRRQGSGVKQTLNFDLLKLAGDVESNPGPQWAREIGAQLRRIGDDLNAQYERRRQGSGVKQTLNFDLLKLAGDVESNPGPQWAREIGAQLRRIGDDLNAQYERRRQGSGVKQTLNFDLLKLAGDVESNPGPQWAREIGAQLRRIGDDLNAQYERRRQGSGVKQTLNFDLLKLAGDVESNPGPQWAREIGAQLRRIGDDLNAQYERRRQGSGVKQTLNFDLLKLAGDVESNPGPQWAREIGAQLRRIGDDLNAQYERRRQGSGVKQTLNFDLLKLAGDVESNPGPQWAREIGAQLRRIGDDLNAQYERRRQGSGVKQTLNFDLLKLAGDVESNPGPQWAREIGAQLRRIGDDLNAQYERRRQGSGVKQTLNFDLLKLAGDVESNPGPQWAREIGAQLRRIGDDLNAQYERRRQGSGVKQTLNFDLLKLAGDVESNPGP

SEQ ID NO: 231 - protein, 154 aa, Artificial Sequence
  Synthetic: (KittyCatBH3.F2A)^3 without the v5 tag
MQWAREIGAQERREADDENAQYERRRQGSGVKQTLNFDLLKLAGDVESNPGPQWAREIGAQERREADDENAQYERRRQGSGVKQTLNFDLLKLAGDVESNPGPQWAREIGAQERREADDENAQYERRRQGSGVKQTLNFDLLKLAGDVESNPGP

SEQ ID NO: 232 - protein, 148 aa, Artificial Sequence
  Synthetic: (KittyCatBH3.P2A)^3 without the v5 tag
MQWAREIGAQERREADDENAQYERRRQGSGATNFSLLKQAGDVEENPGPQWAREIGAQERREADDENAQYERRRQGSGATNFSLLKQAGDVEENPGPQWAREIGAQERREADDENAQYERRRQGSGVKQTLNFDLLKLAGDVESNPGP

SEQ ID NO: 233 - protein, 123 aa, Artificial Sequence
  Synthetic: PumaBH3(x3.P2A)_miR122 without the v5 tag
MEEQWAREIGAQLRRMADDLNAQYERRGSGATNFSLLKQAGDVEENPGPEEQWAREIGAQLRRMADDLNAQYERRGSGATNFSLLKQAGDVEENPGPEEQWAREIGAQLRRMADDLNAQYERR

SEQ ID NO: 234 - protein, 103 aa, Artificial Sequence
  Synthetic: (PUMA BH3.GGGSx3)x3 without the v5 tag
MEEQWAREIGAQLRRMADDLNAQYERRGGGSGGGSGGGSEEQWAREIGAQLRRMADDLNAQYERRGGGSGGGSGGGSEEQWAREIGAQLRRMADDLNAQYERR

SEQ ID NO: 235 - protein, 103 aa, Artificial Sequence; identical to SEQ ID NO: 234
  Synthetic: (PUMA BH3.GGGSx3)x3_DX without the v5 tag

SEQ ID NO: 236 - protein, 65 aa, Artificial Sequence
  Synthetic: PUMA BH3.GGGSx3.PUMA BH3 without the v5 tag
MEEQWAREIGAQLRRMADDLNAQYERRGGGSGGGSGGGSEEQWAREIGAQLRRMADDLNAQYERR

SEQ ID NO: 237 - protein, 123 aa, Artificial Sequence; identical to SEQ ID NO: 233
  Synthetic: PumaBH3(x3.P2A)_miR122 without the v5 tag

SEQ ID NO: 238 - DNA, 81 bp, Artificial Sequence
  Synthetic: PumaBH3_HS3UPCRfree
atggaggagcagtgggctcgagagatcggagcccaattgaggaggatggcggatgacctcaatgcacagtacgaacgtagg

SEQ ID NO: 239 - DNA, 99 bp, Artificial Sequence
  Synthetic: PumaBH3.nHIS_HS3UPCRfree
atgcaccatcatcatcaccacgaagagcaatgggcgcgggaaattggagcccagctgcggagaatggctgatgatttgaacgcgcagtatgaaagacgt

SEQ ID NO: 240 - DNA, 123 bp, Artificial Sequence
  Synthetic: PumaBH3.nV5_HS3UPCRfree
atgggtaagcctatcccaaaccctctgctggggctcgactctacagaggaacaatgggcacgagagatcggggctcagttacgacgtatggcggacgacctgaacgcccagtatgagcgaagg

SEQ ID NO: 241 - DNA, 99 bp, Artificial Sequence
  Synthetic: PumaBH3.cHIS_HS3UPCRfree
atggaggaacagtgggcaagagagattggcgcgcagttgaggagaatggcagatgacctgaatgctcaatatgagagacggcaccatcatcatcatcat

SEQ ID NO: 242 - DNA, 429 bp, Artificial Sequence
  Synthetic: PumaBH3(x3.F2A).v5_Hs3UPCRfree
atggaagaacagtgggcaagagaaatcggagcacagctgcgacggatggccgacgacttgaacgcgcagtatgaaagaagaggaagcggcgtgaaacagacactgaacttcgaccttctgaaactggcaggtgatgtggaatcaaatcctggtcccgaagagcaatgggccagagagatcggcgcccagcttcggcgcatggccgacgatcttaatgcccagtacgaacggcgggggtctggagtgaaacaaactctgaacttcgatctcctgaaactagcgggggacgttgagtccaacccggggcctgaggaacaatgggcccgcgagatcggcgcccaattgagacgtatggccgacgatctaaatgcccagtacgaacggcgcggcaagcctattccaaatccgttgttggggctggacagcaca

SEQ ID NO: 243 - DNA, 123 bp, Artificial Sequence
  Synthetic: PumaBH3.cV5_HS3UPCRfree
atggaggagcagtgggctagggaaataggcgcccagctcagacggatggcggacgatctcaatgcacaatacgaaaggcggggaaagccaatcccaaatccgctcctggggttggacagtact

SEQ ID NO: 244 - DNA, 429 bp, Artificial Sequence
  Synthetic: PumaBH3(x3.F2A).v5_miR142.3p_tp
atggaggagcaatgggctagagagatcggcgcacagctgcggcgcatggccgatgatctgaacgcccaatacgagaggagaggttccggagtgaagcagactctgaacttcgatctgctcaagcttgcgggcgacgtggaatcgaaccccggccctgaggaacaatgggcgcgcgaaatcggtgcccagctccgccggatggcagacgacctgaacgcgcagtacgagcggcgggggagcggggtcaagcagaccctgaatttcgaccttctgaagctggccggagatgtggagtcaaacccgggacccgaagaacagtgggccagggaaattggagctcagctgcggagaatggccgacgacctcaacgcccagtacgaacggcgcggaaaacctatcccgaacccactcttgggcctggactccacc

SEQ ID NO: 245 - DNA, 429 bp, Artificial Sequence; identical to SEQ ID NO: 244
  Synthetic: PumaBH3(x3.F2A).v5_miR122/142.3p_tp

SEQ ID NO: 246 - DNA, 429 bp, Artificial Sequence; identical to SEQ ID NO: 244
  Synthetic: PumaBH3(x3.F2A).v5_tp

SEQ ID NO: 247 - DNA, 429 bp, Artificial Sequence; identical to SEQ ID NO: 244
  Synthetic: PumaBH3(x3.F2A).v5_miR122_tp

SEQ ID NO: 248 - DNA, 810 bp, Artificial Sequence
  Synthetic: (pumaBH3.F2A)^5_cV5,(pumaBH3.F2A)^5_cV5_DX
atggaagaacaatgggcacgggaaattggagcgcagctgaggagaatggctgatgacctgaacgctcaatacgaacgccgcggatccggcgtgaagcagactcttaacttcgacttgctcaagctcgctggcgatgtcgagtccaacccgggccccgaggagcaatgggcccgcgaaattggggcccagctccggcgcatggcggacgatctcaacgcgcagtatgaacggaggggctccggagtcaagcagaccctcaacttcgacctcctgaagctcgccggcgacgtggagagcaaccctggtcccgaagaacagtgggccagagaaatcggtgcccagcttcgccggatggccgacgacttgaacgcccaatacgagcggagaggctcgggagtgaagcaaaccctgaacttcgatctgcttaagctggctggggacgtcgaatccaaccccggacctgaggagcagtgggcccgggaaatcggggcccaactgagaaggatggcagacgacctgaatgcccagtacgagcgccgcggctcaggagtgaaacagaccttgaactttgacttgctgaagctggccggggacgtggaaagcaacccggggccagaggaacagtgggcgcgggagatcggtgctcagctgagaagaatggcagatgatctgaatgcgcagtacgaacggcgcggatctggagtcaaacagaccctgaatttcgacctgttgaaactggccggagatgtggaatcaaaccccggccctggaaagccgatcccgaacccactgctggggctcgactccacc

SEQ ID NO: 249 - DNA, 810 bp, Artificial Sequence
  Synthetic: (BimBH3.F2A)^5_cV5,(BimBH3.F2A)^5_cV5_DX
atggacatgcgacctgagatttggattgcgcaggaacttagacggattggcgatgaattcaacgcatactatgcacggagaggctccggcgtcaagcagaccctgaactttgacctcctcaagctggcgggcgatgtggagagcaaccccggccccgatatgcgcccagaaatctggattgctcaagaactccgcagaatcggcgacgagtttaatgcgtactacgccagacgcggaagcggcgtgaagcagactcttaacttcgatctgctcaaactggccggcgacgtggagtcaaatcctggcccggatatgcggcccgagatatggattgcccaggagctccgccgcatcggggacgagttcaacgcctactacgcacgccgcgggtcgggcgtgaaacagaccttgaactttgatctgctgaagctggcaggggacgtggaatccaacccgggaccggacatgaggcccgagatctggatcgcccaggaactgcggagaatcggagatgagtttaacgcctattacgcccggaggggatcgggagtcaagcaaaccctcaacttcgacctgttgaagctggctggagatgtcgaatcgaaccccggtccggacatgcggccggaaatttggatcgcacaggaactgaggaggattggggacgaattcaatgcttactacgcccgccgcggatccggagtgaagcaaacactgaatttcgacctcctgaagcttgccggggacgtcgagtccaaccctggtcctggaaagccgatcccgaaccctttgctgggcctggacagcacc

SEQ ID NO: 250 - DNA, 579 bp, Artificial Sequence
  Synthetic: (SuperPumaBH3.F2A)^3_cV5
atgcaatgggccagagagatcggagcacaactgcggagaattggagatgacctgaacgcacagtacgaacgccgcagacagggatcgggcgtgaagcaaaccctcaatttcgatcttctgaaattggcgggcgacgtcgagtcgaaccctggtccacaatgggcgcgggaaatcggtgcccagctgaggagaattggcgatgacctcaacgcccagtacgaaaggcggcggcagggcagcggagtgaagcagactcttaacttcgacttgctgaagctggctggggacgtggaatccaaccctggaccccagtgggcccgcgaaatcggcgcccagctgcggcgcatcggggacgacctcaatgcgcagtacgagcggcggcgccaggggtccggcgtcaagcagaccctgaacttcgacctcctcaagctggccggagatgtggagtccaacccgggtcccggatcaggggtcaagcaaactctgaactttgatctgctgaagctcgctggcgacgtggagagcaacccgggaccgggaaagcctattccgaaccccctgctgggcctggactccacc

SEQ ID NO: 251 - DNA, 810 bp, Artificial Sequence
  Synthetic: (SuperPumaBH3.F2A)^5_cV5
atgcaatgggccagagaaattggagcgcaactcagaagaatcggcgacgatctgaacgctcagtacgaaagacgccgccagggatccggcgtgaagcaaactctgaactttgacctccttaagctcgccggggatgtcgagagcaatcctggaccgcagtgggccagggagatcggtgcccagttgcggcggatcggcgatgatctcaacgcccaatatgaacggcggagacagggaagcggagtcaagcaaaccttgaacttcgacctcctgaagctggctggcgacgtcgaatccaaccctggaccccagtgggcgcgggaaattggtgcccagctgcgacggatcggggatgacctcaacgcacaatacgagaggcggaggcagggttccggcgtcaagcagactcttaatttcgatctcctgaaattggccggcgatgtggagtcaaacccgggcccgcaatgggcccgcgagatcggcgcccaactgcggcgcattggcgacgacctgaacgcccagtacgagcgcagacgccaggggtccggagtgaagcagaccctcaacttcgatttgttgaagctcgcgggcgacgtggaaagcaatccgggaccacagtgggctagagagatcggagcccagctgaggcgcattggtgacgacctcaatgcacagtacgaacggaggcggcagggttcgggggtgaaacagaccctgaacttcgatctgctcaagctggcgggagatgtggaatcgaacccagggccgggaaagcctattcccaaccctctgctgggcctggattccacc

SEQ ID NO: 252 - DNA, 810 bp, Artificial Sequence
  Synthetic: (KittyCatBH3.F2A)^5_cV5,(KittyCatBH3.F2A)^5_cV5_DX
atgcaatgggcacgagagattggagcacaggaacggagagaagccgatgacgagaacgcgcagtacgaacggcggcgccagggttccggcgtgaaacagactctcaacttcgacttgctgaagctcgccggggacgtggaatccaatccaggacctcaatgggcccgggaaatcggcgcgcaggaaagacgcgaagccgacgatgaaaacgcccaatacgagcggcgcagacaggggtcgggcgtgaagcaaacgctgaatttcgacctcctgaagttggccggagatgtcgagtccaaccctggaccccagtgggccagagagattggtgcccaagaaaggagagaagcggatgacgaaaacgctcagtacgagaggcgcagacaaggctcgggagtcaagcagactctgaacttcgatcttctgaagctggctggcgatgtggaaagcaacccaggaccgcagtgggcgcgcgagatcggagcccaggagaggagggaggccgacgacgaaaatgcacagtacgaaagaaggcgccagggctccggagtgaagcagaccctcaactttgacttgctcaagctggccggcgacgtggagagcaaccctggcccgcaatgggctagagaaatcggagctcaggagcggcgggaagcagacgacgagaatgcgcagtatgagcgccggcggcagggaagcggtgtcaagcaaaccctgaactttgatctgctcaaactggccggggatgtggaatcgaaccccggaccggggaagcccatccccaacccgcttctgggcctggactccacc

SEQ ID NO: 253 - DNA, 810 bp, Artificial Sequence; identical to SEQ ID NO: 252
  Synthetic: (KittyCatBH3.F2A)^5_cV5, (KittyCatBH3.F2A)^5_cV5_DX

SEQ ID NO: 254 - DNA, 810 bp, Artificial Sequence
  Synthetic: (BadBH3.F2A)^5_cV5
atgaacctctgggcagcccaacgctacggaagagagcttcgaagaatgtcagacgagtttgtcgactccttcaagaaaggcggttccggagtgaagcagactctgaatttcgaccttctcaagctggccggggacgtggagagcaaccctggcccaaatctctgggccgctcagcggtacggccgggaattgagaaggatgtcggatgaatttgtggattccttcaaaaagggcggatccggcgtgaagcaaactctgaacttcgacctgttgaagcttgccggcgacgtggagtcgaaccccgggccgaacttgtgggcggctcagagatacggtagagaactgcggcggatgagcgacgaattcgtggacagctttaagaagggaggaagcggagtgaaacaaaccctcaacttcgatctgctgaagctcgcgggcgatgtcgaatcgaacccgggacctaatctgtgggctgcacagcgctacggacgcgagctgcgccgcatgagcgatgagttcgtggactcttttaaaaagggtggttccggcgtcaaacagactttgaactttgacctcctgaagcttgcaggggatgtggaatccaacccggggcctaacctgtgggcggcccaaagatacggtcgggagctgaggcgcatgtccgatgaattcgtcgattcgttcaagaaggggggaagcggcgtgaaacagacccttaacttcgacttgctcaaactggcgggagatgtggagtccaacccaggccccggaaagccgatccctaatccgctgctcggcctggactccacc

SEQ ID NO: 255 - DNA, 900 bp, Artificial Sequence
  Synthetic: (Noxa-F2A-BadBH3-F2A)^3_cV5
atgcctgccgaacttgaagtcgaatgcgcgacccagctgagaagatttggagacaaactgaacttccggcaaaagctgctgggctcgggagtcaaacagactcttaacttcgacttgctgaagcttgccggcgacgtcgagtccaacccgggtccaaacctctgggccgcccaaagatacggacgggagctcaggagaatgtccgatgagttcgtggattcgttcaagaagggaggttccggtgtcaagcagactctgaacttcgatctgttgaagctcgcgggagatgtcgaaagcaaccctggtcctcctgccgagctggaggtggaatgtgccacccagctgcgcagattcggggacaagctcaactttcggcagaagcttctcggaagcggtgtgaaacagaccctgaatttcgacctcctgaaacttgcaggagatgtggagtcaaaccccggaccgaacctgtgggcggcgcagagatatggacgcgaactgcgccggatgtcagacgagttcgtcgacagcttcaagaaagggggttccggagtaaagcagacgctgaactttgatctgcttaagctggctggcgacgtggaaagcaatccgggcccgccggctgagctcgaagtggagtgcgcaacccaacttcggcggttcggcgacaagctgaacttcagacagaagctgttgggcagcggagtgaagcagaccttgaactttgaccttctcaagctggccggggatgtggaatccaaccctgggcccaatctgtgggctgcccagcgctacggaagagaactgcggcggatgtcggacgaattcgtggactccttcaaaaagggcggcagcggcgtgaagcaaaccctcaatttcgatctgctgaagttggccggggac

SEQ ID NO: 256 - DNA, 3150 bp, Artificial Sequence
  Synthetic: (pumaBH3.F2A)^10_cV5,(pumaBH3.F2A)^10_cV5_DX
atggaggagcagtgggccagagagatcggcgcccagctgagaagaatggccgacgacctgaacgcccagtacgagagaagaggcagcggcgtgaagcagaccctgaacttcgacctgctgaagctggccggcgacgtggagagcaaccccggccccgaggagcagtgggccagagagatcggcgcccagctgagaagaatggccgacgacctgaacgcccagtacgagagaagaggcagcggcgtgaagcagaccctgaacttcgacctgctgaagctggccggcgacgtggagagcaaccccggccccgaggagcagtgggccagagagatcggcgcccagctgagaagaatggccgacgacctgaacgcccagtacgagagaagaggcagcggcgtgaagcagaccctgaacttcgacctgctgaagctggccggcgacgtggagagcaaccccggccccgaggagcagtgggccagagagatcggcgcccagctgagaagaatggccgacgacctgaacgcccagtacgagagaagaggcagcggcgtgaagcagaccctgaacttcgacctgctgaagctggccggcgacgtggagagcaaccccggccccgaggagcagtgggccagagagatcggcgcccagctgagaagaatggccgacgacctgaacgcccagtacgagagaagaggcagcggcgtgaagcagaccctgaacttcgacctgctgaagctggccggcgacgtggagagcaaccccggccccgaggagcagtgggccagagagatcggcgcccagctgagaagaatggccgacgacctgaacgcccagtacgagagaagaggcagcggcgtgaagcagaccctgaacttcgacctgctgaagctggccggcgacgtggagagcaaccccggccccgaggagcagtgggccagagagatcggcgcccagctgagaagaatggccgacgacctgaacgcccagtacgagagaagaggcagcggcgtgaagcagaccctgaacttcgacctgctgaagctggccggcgacgtggagagcaaccccggccccgaggagcagtgggccagagagatcggcgcccagctgagaagaatggccgacgacctgaacgcccagtacgagagaagaggcagcggcgtgaagcagaccctgaacttcgacctgctgaagctggccggcgacgtggagagcaaccccggccccgaggagcagtgggccagagagatcggcgcccagctgagaagaatggccgacgacctgaacgcccagtacgagagaagaggcagcggcgtgaagcagaccctgaacttcgacctgctgaagctggccggcgacgtggagagcaaccccggccccgaggagcagtgggccagagagatcggcgcccagctgagaagaatggccgacgacctgaacgcccagtacgagagaagaggcagcggcgtgaagcagaccctgaacttcgacctgctgaagctggccggcgacgtggagagcaaccccggccccggcaagcccatccccaaccccctgctgggcctggacagcaccatggaggagcagtgggccagagagatcggcgcccagctgagaagaatggccgacgacctgaacgcccagtacgagagaagaggcagcggcgtgaagcagaccctgaacttcgacctgctgaagctggccggcgacgtggagagcaaccccggccccgaggagcagtgggccagagagatcggcgcccagctgagaagaatggccgacgacctgaacgcccagtacgagagaagaggcagcggcgtgaagcagaccctgaacttcgacctgctgaagctggccggcgacgtggagagcaaccccggccccgaggagcagtgggccagagagatcggcgcccagctgagaagaatggccgacgacctgaacgcccagtacgagagaagaggcagcggcgtgaagcagaccctgaacttcgacctgctgaagctggccggcgacgtggagagcaaccccggccccgaggagcagtgggccagagagatcggcgcccagctgagaagaatggccgacgacctgaacgcccagtacgagagaagaggcagcggcgtgaagcagaccctgaacttcgacctgctgaagctggccggcgacgtggagagcaaccccggccccgaggagcagtgggccagagagatcggcgcccagctgagaagaatggccgacgacctgaacgcccagtacgagagaagaggcagcggcgtgaagcagaccctgaacttcgacctgctgaagctggccggcgacgtggagagcaaccccggccccgaggagcagtgggccagagagatcggcgcccagctgagaagaatggccgacgacctgaacgcccagtacgagagaagaggcagcggcgtgaagcagaccctgaacttcgacctgctgaagctggccggcgacgtggagagcaaccccggccccgaggagcagtgggccagagagatcggcgcccagctgagaagaatggccgacgacctgaacgcccagtacgagagaagaggcagcggcgtgaagcagaccctgaacttcgacctgctgaagctggccggcgacgtggagagcaaccccggccccgaggagcagtgggccagagagatcggcgcccagctgagaagaatggccgacgacctgaacgcccagtacgagagaagaggcagcggcgtgaagcagaccctgaacttcgacctgctgaagctggccggcgacgtggagagcaaccccggccccgaggagcagtgggccagagagatcggcgcccagctgagaagaatggccgacgacctgaacgcccagtacgagagaagaggcagcggcgtgaagcagaccctgaacttcgacctgctgaagctggccggcgacgtggagagcaaccccggccccgaggagcagtgggccagagagatcggcgcccagctgagaagaatggccgacgacctgaacgcccagtacgagagaagaggcagcggcgtgaagcagaccctgaacttcgacctgctgaagctggccggcgacgtggagagcaaccccggccccggcaagcccatccccaaccccctgctgggcctggacagcacc

SEQ ID NO: 257 - DNA, 3150 bp, Artificial Sequence
  Synthetic: (BimBH3.F2A)^10_cV5,(BimBH3.F2A)^10_cV5_DX
atggacatgagacccgagatctggatcgcccaggagctgagaagaatcggcgacgagttcaacgcctactacgccagaagaggcagcggcgtgaagcagaccctgaacttcgacctgctgaagctggccggcgacgtggagagcaaccccggccccgacatgagacccgagatctggatcgcccaggagctgagaagaatcggcgacgagttcaacgcctactacgccagaagaggcagcggcgtgaagcagaccctgaacttcgacctgctgaagctggccggcgacgtggagagcaaccccggccccgacatgagacccgagatctggatcgcccaggagctgagaagaatcggcgacgagttcaacgcctactacgccagaagaggcagcggcgtgaagcagaccctgaacttcgacctgctgaagctggccggcgacgtggagagcaaccccggccccgacatgagacccgagatctggatcgcccaggagctgagaagaatcggcgacgagttcaacgcctactacgccagaagaggcagcggcgtgaagcagaccctgaacttcgacctgctgaagctggccggcgacgtggagagcaaccccggccccgacatgagacccgagatctggatcgcccaggagctgagaagaatcggcgacgagttcaacgcctactacgccagaagaggcagcggcgtgaagcagaccctgaacttcgacctgctgaagctggccggcgacgtggagagcaaccccggccccgacatgagacccgagatctggatcgcccaggagctgagaagaatcggcgacgagttcaacgcctactacgccagaagaggcagcggcgtgaagcagaccctgaacttcgacctgctgaagctggccggcgacgtggagagcaaccccggccccgacatgagacccgagatctggatcgcccaggagctgagaagaatcggcgacgagttcaacgcctactacgccagaagaggcagcggcgtgaagcagaccctgaacttcgacctgctgaagctggccggcgacgtggagagcaaccccggccccgacatgagacccgagatctggatcgcccaggagctgagaagaatcggcgacgagttcaacgcctactacgccagaagaggcagcggcgtgaagcagaccctgaacttcgacctgctgaagctggccggcgacgtggagagcaaccccggccccgacatgagacccgagatctggatcgcccaggagctgagaagaatcggcgacgagttcaacgcctactacgccagaagaggcagcggcgtgaagcagaccctgaacttcgacctgctgaagctggccggcgacgtggagagcaaccccggccccgacatgagacccgagatctggatcgcccaggagctgagaagaatcggcgacgagttcaacgcctactacgccagaagaggcagcggcgtgaagcagaccctgaacttcgacctgctgaagctggccggcgacgtggagagcaaccccggccccggcaagcccatccccaaccccctgctgggcctggacagcaccatggacatgagacccgagatctggatcgcccaggagctgagaagaatcggcgacgagttcaacgcctactacgccagaagaggcagcggcgtgaagcagaccctgaacttcgacctgctgaagctggccggcgacgtggagagcaaccccggccccgacatgagacccgagatctggatcgcccaggagctgagaagaatcggcgacgagttcaacgcctactacgccagaagaggcagcggcgtgaagcagaccctgaacttcgacctgctgaagctggccggcgacgtggagagcaaccccggccccgacatgagacccgagatctggatcgcccaggagctgagaagaatcggcgacgagttcaacgcctactacgccagaagaggcagcggcgtgaagcagaccctgaacttcgacctgctgaagctggccggcgacgtggagagcaaccccggccccgacatgagacccgagatctggatcgcccaggagctgagaagaatcggcgacgagttcaacgcctactacgccagaagaggcagcggcgtgaagcagaccctgaacttcgacctgctgaagctggccggcgacgtggagagcaaccccggccccgacatgagacccgagatctggatcgcccaggagctgagaagaatcggcgacgagttcaacgcctactacgccagaagaggcagcggcgtgaagcagaccctgaacttcgacctgctgaagctggccggcgacgtggagagcaaccccggccccgacatgagacccgagatctggatcgcccaggagctgagaagaatcggcgacgagttcaacgcctactacgccagaagaggcagcggcgtgaagcagaccctgaacttcgacctgctgaagctggccggcgacgtggagagcaaccccggccccgacatgagacccgagatctggatcgcccaggagctgagaagaatcggcgacgagttcaacgcctactacgccagaagaggcagcggcgtgaagcagaccctgaacttcgacctgctgaagctggccggcgacgtggagagcaaccccggccccgacatgagacccgagatctggatcgcccaggagctgagaagaatcggcgacgagttcaacgcctactacgccagaagaggcagcggcgtgaagcagaccctgaacttcgacctgctgaagctggccggcgacgtggagagcaaccccggccccgacatgagacccgagatctggatcgcccaggagctgagaagaatcggcgacgagttcaacgcctactacgccagaagaggcagcggcgtgaagcagaccctgaacttcgacctgctgaagctggccggcgacgtggagagcaaccccggccccgacatgagacccgagatctggatcgcccaggagctgagaagaatcggcgacgagttcaacgcctactacgccagaagaggcagcggcgtgaagcagaccctgaacttcgacctgctgaagctggccggcgacgtggagagcaaccccggccccggcaagcccatccccaaccccctgctgggcctggacagcacc

SEQ ID NO: 258 - DNA, 963 bp, Artificial Sequence
  Synthetic: (Puma-P2A-BimBH3-F2A)^3_cV5
atggaggagcagtgggccagagagatcggcgcccagctgagaagaatggccgacgacctgaacgcccagtacgagagaagaggcagcggcgtgaagcagaccctgaacttcgacctgctgaagctggccggcgacgtggagagcaaccccggccccgacatgagacccgagatctggatcgcccaggagctgagaagaatcggcgacgagttcaacgcctactacgccagaagaggcagcggcgtgaagcagaccctgaacttcgacctgctgaagctggccggcgacgtggagagcaaccccggccccgaggagcagtgggccagagagatcggcgcccagctgagaagaatggccgacgacctgaacgcccagtacgagagaagaggcagcggcgtgaagcagaccctgaacttcgacctgctgaagctggccggcgacgtggagagcaaccccggccccgacatgagacccgagatctggatcgcccaggagctgagaagaatcggcgacgagttcaacgcctactacgccagaagaggcagcggcgtgaagcagaccctgaacttcgacctgctgaagctggccggcgacgtggagagcaaccccggccccgaggagcagtgggccagagagatcggcgcccagctgagaagaatggccgacgacctgaacgcccagtacgagagaagaggcagcggcgtgaagcagaccctgaacttcgacctgctgaagctggccggcgacgtggagagcaaccccggccccgacatgagacccgagatctggatcgcccaggagctgagaagaatcggcgacgagttcaacgcctactacgccagaagaggcagcggcgtgaagcagaccctgaacttcgacctgctgaagctggccggcgacgtggagagcaaccccggccccggcaagcccatccccaaccccctgctgggcctggacagcacc

SEQ ID NO: 259 - DNA, 1575 bp, Artificial Sequence
  Synthetic: (Puma-F2A-BimBH3-F2A)^5_cV5,(Puma-F2A-BimBH3F2A)^5_cV5_DX
atggaggagcagtgggccagagagatcggcgcccagctgagaagaatggccgacgacctgaacgcccagtacgagagaagaggcagcggcgtgaagcagaccctgaacttcgacctgctgaagctggccggcgacgtggagagcaaccccggccccgacatgagacccgagatctggatcgcccaggagctgagaagaatcggcgacgagttcaacgcctactacgccagaagaggcagcggcgtgaagcagaccctgaacttcgacctgctgaagctggccggcgacgtggagagcaaccccggccccgaggagcagtgggccagagagatcggcgcccagctgagaagaatggccgacgacctgaacgcccagtacgagagaagaggcagcggcgtgaagcagaccctgaacttcgacctgctgaagctggccggcgacgtggagagcaaccccggccccgacatgagacccgagatctggatcgcccaggagctgagaagaatcggcgacgagttcaacgcctactacgccagaagaggcagcggcgtgaagcagaccctgaacttcgacctgctgaagctggccggcgacgtggagagcaaccccggccccgaggagcagtgggccagagagatcggcgcccagctgagaagaatggccgacgacctgaacgcccagtacgagagaagaggcagcggcgtgaagcagaccctgaacttcgacctgctgaagctggccggcgacgtggagagcaaccccggccccgacatgagacccgagatctggatcgcccaggagctgagaagaatcggcgacgagttcaacgcctactacgccagaagaggcagcggcgtgaagcagaccctgaacttcgacctgctgaagctggccggcgacgtggagagcaaccccggccccgaggagcagtgggccagagagatcggcgcccagctgagaagaatggccgacgacctgaacgcccagtacgagagaagaggcagcggcgtgaagcagaccctgaacttcgacctgctgaagctggccggcgacgtggagagcaaccccggccccgacatgagacccgagatctggatcgcccaggagctgagaagaatcggcgacgagttcaacgcctactacgccagaagaggcagcggcgtgaagcagaccctgaacttcgacctgctgaagctggccggcgacgtggagagcaaccccggccccgaggagcagtgggccagagagatcggcgcccagctgagaagaatggccgacgacctgaacgcccagtacgagagaagaggcagcggcgtgaagcagaccctgaacttcgacctgctgaagctggccggcgacgtggagagcaaccccggccccgacatgagacccgagatctggatcgcccaggagctgagaagaatcggcgacgagttcaacgcctactacgccagaagaggcagcggcgtgaagcagaccctgaacttcgacctgctgaagctggccggcgacgtggagagcaaccccggccccggcaagcccatccccaaccccctgctgggcctggacagcacc

SEQ ID NO: 260 - DNA, 3105 bp, Artificial Sequence
  Synthetic: (Puma-F2A-BimBH3-F2A)^10_cV5
atggaggagcagtgggccagagagatcggcgcccagctgagaagaatggccgacgacctgaacgcccagtacgagagaagaggcagcggcgtgaagcagaccctgaacttcgacctgctgaagctggccggcgacgtggagagcaaccccggccccgacatgagacccgagatctggatcgcccaggagctgagaagaatcggcgacgagttcaacgcctactacgccagaagaggcagcggcgtgaagcagaccctgaacttcgacctgctgaagctggccggcgacgtggagagcaaccccggccccgaggagcagtgggccagagagatcggcgcccagctgagaagaatggccgacgacctgaacgcccagtacgagagaagaggcagcggcgtgaagcagaccctgaacttcgacctgctgaagctggccggcgacgtggagagcaaccccggccccgacatgagacccgagatctggatcgcccaggagctgagaagaatcggcgacgagttcaacgcctactacgccagaagaggcagcggcgtgaagcagaccctgaacttcgacctgctgaagctggccggcgacgtggagagcaaccccggccccgaggagcagtgggccagagagatcggcgcccagctgagaagaatggccgacgacctgaacgcccagtacgagagaagaggcagcggcgtgaagcagaccctgaacttcgacctgctgaagctggccggcgacgtggagagcaaccccggccccgacatgagacccgagatctggatcgcccaggagctgagaagaatcggcgacgagttcaacgcctactacgccagaagaggcagcggcgtgaagcagaccctgaacttcgacctgctgaagctggccggcgacgtggagagcaaccccggccccgaggagcagtgggccagagagatcggcgcccagctgagaagaatggccgacgacctgaacgcccagtacgagagaagaggcagcggcgtgaagcagaccctgaacttcgacctgctgaagctggccggcgacgtggagagcaaccccggccccgacatgagacccgagatctggatcgcccaggagctgagaagaatcggcgacgagttcaacgcctactacgccagaagaggcagcggcgtgaagcagaccctgaacttcgacctgctgaagctggccggcgacgtggagagcaaccccggccccgaggagcagtgggccagagagatcggcgcccagctgagaagaatggccgacgacctgaacgcccagtacgagagaagaggcagcggcgtgaagcagaccctgaacttcgacctgctgaagctggccggcgacgtggagagcaaccccggccccgacatgagacccgagatctggatcgcccaggagctgagaagaatcggcgacgagttcaacgcctactacgccagaagaggcagcggcgtgaagcagaccctgaacttcgacctgctgaagctggccggcgacgtggagagcaaccccggccccgaggagcagtgggccagagagatcggcgcccagctgagaagaatggccgacgacctgaacgcccagtacgagagaagaggcagcggcgtgaagcagaccctgaacttcgacctgctgaagctggccggcgacgtggagagcaaccccggccccgacatgagacccgagatctggatcgcccaggagctgagaagaatcggcgacgagttcaacgcctactacgccagaagaggcagcggcgtgaagcagaccctgaacttcgacctgctgaagctggccggcgacgtggagagcaaccccggccccgaggagcagtgggccagagagatcggcgcccagctgagaagaatggccgacgacctgaacgcccagtacgagagaagaggcagcggcgtgaagcagaccctgaacttcgacctgctgaagctggccggcgacgtggagagcaaccccggccccgacatgagacccgagatctggatcgcccaggagctgagaagaatcggcgacgagttcaacgcctactacgccagaagaggcagcggcgtgaagcagaccctgaacttcgacctgctgaagctggccggcgacgtggagagcaaccccggccccgaggagcagtgggccagagagatcggcgcccagctgagaagaatggccgacgacctgaacgcccagtacgagagaagaggcagcggcgtgaagcagaccctgaacttcgacctgctgaagctggccggcgacgtggagagcaaccccggccccgacatgagacccgagatctggatcgcccaggagctgagaagaatcggcgacgagttcaacgcctactacgccagaagaggcagcggcgtgaagcagaccctgaacttcgacctgctgaagctggccggcgacgtggagagcaaccccggccccgaggagcagtgggccagagagatcggcgcccagctgagaagaatggccgacgacctgaacgcccagtacgagagaagaggcagcggcgtgaagcagaccctgaacttcgacctgctgaagctggccggcgacgtggagagcaaccccggccccgacatgagacccgagatctggatcgcccaggagctgagaagaatcggcgacgagttcaacgcctactacgccagaagaggcagcggcgtgaagcagaccctgaacttcgacctgctgaagctggccggcgacgtggagagcaaccccggccccgaggagcagtgggccagagagatcggcgcccagctgagaagaatggccgacgacctgaacgcccagtacgagagaagaggcagcggcgtgaagcagaccctgaacttcgacctgctgaagctggccggcgacgtggagagcaaccccggccccgacatgagacccgagatctggatcgcccaggagctgagaagaatcggcgacgagttcaacgcctactacgccagaagaggcagcggcgtgaagcagaccctgaacttcgacctgctgaagctggccggcgacgtggagagcaaccccggccccggcaagcccatccccaaccccctgctgggcctggacagcacc

SEQ ID NO: 261 - DNA, 1575 bp, Artificial Sequence
  Synthetic: (SuperPumaBH3.F2A)^10_cV5,(SuperPumaBH3.F2A)^10_cV5_DX
atgcagtgggccagagagatcggcgcccagctgagaagaatcggcgacgacctgaacgcccagtacgagagaagaagacagggcagcggcgtgaagcagaccctgaacttcgacctgctgaagctggccggcgacgtggagagcaaccccggcccccagtgggccagagagatcggcgcccagctgagaagaatcggcgacgacctgaacgcccagtacgagagaagaagacagggcagcggcgtgaagcagaccctgaacttcgacctgctgaagctggccggcgacgtggagagcaaccccggcccccagtgggccagagagatcggcgcccagctgagaagaatcggcgacgacctgaacgcccagtacgagagaagaagacagggcagcggcgtgaagcagaccctgaacttcgacctgctgaagctggccggcgacgtggagagcaaccccggcccccagtgggccagagagatcggcgcccagctgagaagaatcggcgacgacctgaacgcccagtacgagagaagaagacagggcagcggcgtgaagcagaccctgaacttcgacctgctgaagctggccggcgacgtggagagcaaccccggcccccagtgggccagagagatcggcgcccagctgagaagaatcggcgacgacctgaacgcccagtacgagagaagaagacagggcagcggcgtgaagcagaccctgaacttcgacctgctgaagctggccggcgacgtggagagcaaccccggcccccagtgggccagagagatcggcgcccagctgagaagaatcggcgacgacctgaacgcccagtacgagagaagaagacagggcagcggcgtgaagcagaccctgaacttcgacctgctgaagctggccggcgacgtggagagcaaccccggcccccagtgggccagagagatcggcgcccagctgagaagaatcggcgacgacctgaacgcccagtacgagagaagaagacagggcagcggcgtgaagcagaccctgaacttcgacctgctgaagctggccggcgacgtggagagcaaccccggcccccagtgggccagagagatcggcgcccagctgagaagaatcggcgacgacctgaacgcccagtacgagagaagaagacagggcagcggcgtgaagcagaccctgaacttcgacctgctgaagctggccggcgacgtggagagcaaccccggcccccagtgggccagagagatcggcgcccagctgagaagaatcggcgacgacctgaacgcccagtacgagagaagaagacagggcagcggcgtgaagcagaccctgaacttcgacctgctgaagctggccggcgacgtggagagcaaccccggcccccagtgggccagagagatcggcgcccagctgagaagaatcggcgacgacctgaacgcccagtacgagagaagaagacagggcagcggcgtgaagcagaccctgaacttcgacctgctgaagctggccggcgacgtggagagcaaccccggccccggcaagcccatccccaaccccctgctgggcctggacagcacc

SEQ ID NO: 262 - DNA, 1728 bp, Artificial Sequence
  Synthetic: (KittyCatBH3.F2A)^10_cV5,(KittyCatBH3.F2A)^10_cV5_DX
atgcagtgggccagagagatcggcgcccaggagagaagagaggccgacgacgagaacgcccagtacgagagaagaagacagggcagcggcgtgaagcagaccctgaacttcgacctgctgaagctggccggcgacgtggagagcaaccccggcccccagtgggccagagagatcggcgcccaggagagaagagaggccgacgacgagaacgcccagtacgagagaagaagacagggcagcggcgtgaagcagaccctgaacttcgacctgctgaagctggccggcgacgtggagagcaaccccggcccccagtgggccagagagatcggcgcccaggagagaagagaggccgacgacgagaacgcccagtacgagagaagaagacagggcagcggcgtgaagcagaccctgaacttcgacctgctgaagctggccggcgacgtggagagcaaccccggcccccagtgggccagagagatcggcgcccaggagagaagagaggccgacgacgagaacgcccagtacgagagaagaagacagggcagcggcgtgaagcagaccctgaacttcgacctgctgaagctggccggcgacgtggagagcaaccccggcccccagtgggccagagagatcggcgcccaggagagaagagaggccgacgacgagaacgcccagtacgagagaagaagacagggcagcggcgtgaagcagaccctgaacttcgacctgctgaagctggccggcgacgtggagagcaaccccggcccccagtgggccagagagatcggcgcccaggagagaagagaggccgacgacgagaacgcccagtacgagagaagaagacagggcagcggcgtgaagcagaccctgaacttcgacctgctgaagctggccggcgacgtggagagcaaccccggcccccagtgggccagagagatcggcgcccaggagagaagagaggccgacgacgagaacgcccagtacgagagaagaagacagggcagcggcgtgaagcagaccctgaacttcgacctgctgaagctggccggcgacgtggagagcaaccccggcccccagtgggccagagagatcggcgcccaggagagaagagaggccgacgacgagaacgcccagtacgagagaagaagacagggcagcggcgtgaagcagaccctgaacttcgacctgctgaagctggccggcgacgtggagagcaaccccggcccccagtgggccagagagatcggcgcccaggagagaagagaggccgacgacgagaacgcccagtacgagagaagaagacagggcagcggcgtgaagcagaccctgaacttcgacctgctgaagctggccggcgacgtggagagcaaccccggcccccagtgggccagagagatcggcgcccaggagagaagagaggccgacgacgagaacgcccagtacgagagaagaagacagggcagcggcgtgaagcagaccctgaacttcgacctgctgaagctggccggcgacgtggagagcaaccccggcccccagtgggccagagagatcggcgcccaggagagaagagaggccgacgacgagaacgcccagtacgagagaagaagacagggcagcggcgtgaagcagaccctgaacttcgacctgctgaagctggccggcgacgtggagagcaaccccggccccggcaagcccatccccaaccccctgctgggcctggacagcacc

SEQ ID NO: 263 - DNA, 1728 bp, Artificial Sequence; identical to SEQ ID NO: 262
  Synthetic: (KittyCatBH3.F2A)^10_cV5,(KittyCatBH3.F2A)^10_cV5_DX

SEQ ID NO: 264 - DNA, 963 bp, Artificial Sequence
  Synthetic: (NoxaBH3.F2A)^5_cV5,(NoxaBH3.F2A)^5_cV5_DX
atgcccgccgagctggaggtggagtgcgccacccagctgagaagattcggcgacaagctgaacttcagacagaagctgctgggcagcggcgtgaagcagaccctgaacttcgacctgctgaagctggccggcgacgtggagagcaaccccggcccccccgccgagctggaggtggagtgcgccacccagctgagaagattcggcgacaagctgaacttcagacagaagctgctgggcagcggcgtgaagcagaccctgaacttcgacctgctgaagctggccggcgacgtggagagcaaccccggcccccccgccgagctggaggtggagtgcgccacccagctgagaagattcggcgacaagctgaacttcagacagaagctgctgggcagcggcgtgaagcagaccctgaacttcgacctgctgaagctggccggcgacgtggagagcaaccccggcccccccgccgagctggaggtggagtgcgccacccagctgagaagattcggcgacaagctgaacttcagacagaagctgctgggcagcggcgtgaagcagaccctgaacttcgacctgctgaagctggccggcgacgtggagagcaaccccggcccccccgccgagctggaggtggagtgcgccacccagctgagaagattcggcgacaagctgaacttcagacagaagctgctgggcagcggcgtgaagcagaccctgaacttcgacctgctgaagctggccggcgacgtggagagcaaccccggcccccccgccgagctggaggtggagtgcgccacccagctgagaagattcggcgacaagctgaacttcagacagaagctgctgggcagcggcgtgaagcagaccctgaacttcgacctgctgaagctggccggcgacgtggagagcaaccccggccccggcaagcccatccccaaccccctgctgggcctggacagcacc

SEQ ID NO: 265 - DNA, 1728 bp, Artificial Sequence
  Synthetic: (NoxaBH3.F2A)^10_cV5,(NoxaBH3.F2A)^10_cV5_DX
atgcccgccgagctggaggtggagtgcgccacccagctgagaagattcggcgacaagctgaacttcagacagaagctgctgggcagcggcgtgaagcagaccctgaacttcgacctgctgaagctggccggcgacgtggagagcaaccccggcccccccgccgagctggaggtggagtgcgccacccagctgagaagattcggcgacaagctgaacttcagacagaagctgctgggcagcggcgtgaagcagaccctgaacttcgacctgctgaagctggccggcgacgtggagagcaaccccggcccccccgccgagctggaggtggagtgcgccacccagctgagaagattcggcgacaagctgaacttcagacagaagctgctgggcagcggcgtgaagcagaccctgaacttcgacctgctgaagctggccggcgacgtggagagcaaccccggcccccccgccgagctggaggtggagtgcgccacccagctgagaagattcggcgacaagctgaacttcagacagaagctgctgggcagcggcgtgaagcagaccctgaacttcgacctgctgaagctggccggcgacgtggagagcaaccccggcccccccgccgagctggaggtggagtgcgccacccagctgagaagattcggcgacaagctgaacttcagacagaagctgctgggcagcggcgtgaagcagaccctgaacttcgacctgctgaagctggccggcgacgtggagagcaaccccggcccccccgccgagctggaggtggagtgcgccacccagctgagaagattcggcgacaagctgaacttcagacagaagctgctgggcagcggcgtgaagcagaccctgaacttcgacctgctgaagctggccggcgacgtggagagcaaccccggcccccccgccgagctggaggtggagtgcgccacccagctgagaagattcggcgacaagctgaacttcagacagaagctgctgggcagcggcgtgaagcagaccctgaacttcgacctgctgaagctggccggcgacgtggagagcaaccccggcccccccgccgagctggaggtggagtgcgccacccagctgagaagattcggcgacaagctgaacttcagacagaagctgctgggcagcggcgtgaagcagaccctgaacttcgacctgctgaagctggccggcgacgtggagagcaaccccggcccccccgccgagctggaggtggagtgcgccacccagctgagaagattcggcgacaagctgaacttcagacagaagctgctgggcagcggcgtgaagcagaccctgaacttcgacctgctgaagctggccggcgacgtggagagcaaccccggcccccccgccgagctggaggtggagtgcgccacccagctgagaagattcggcgacaagctgaacttcagacagaagctgctgggcagcggcgtgaagcagaccctgaacttcgacctgctgaagctggccggcgacgtggagagcaaccccggcccccccgccgagctggaggtggagtgcgccacccagctgagaagattcggcgacaagctgaacttcagacagaagctgctgggcagcggcgtgaagcagaccctgaacttcgacctgctgaagctggccggcgacgtggagagcaaccccggccccggcaagcccatccccaaccccctgctgggcctggacagcacc

SEQ ID NO: 266 - DNA, 3105 bp, Artificial Sequence
  Synthetic: (BadBH3.F2A)^10_cV5,(BadBH3.F2A)^10_cV5_DX
atgcccgccgagctggaggtggagtgcgccacccagctgagaagattcggcgacaagctgaacttcagacagaagctgctgggcagcggcgtgaagcagaccctgaacttcgacctgctgaagctggccggcgacgtggagagcaaccccggccccaacctgtgggccgcccagagatacggcagagagctgagaagaatgagcgacgagttcgtggacagcttcaagaagggcggcagcggcgtgaagcagaccctgaacttcgacctgctgaagctggccggcgacgtggagagcaaccccggcccccccgccgagctggaggtggagtgcgccacccagctgagaagattcggcgacaagctgaacttcagacagaagctgctgggcagcggcgtgaagcagaccctgaacttcgacctgctgaagctggccggcgacgtggagagcaaccccggccccaacctgtgggccgcccagagatacggcagagagctgagaagaatgagcgacgagttcgtggacagcttcaagaagggcggcagcggcgtgaagcagaccctgaacttcgacctgctgaagctggccggcgacgtggagagcaaccccggcccccccgccgagctggaggtggagtgcgccacccagctgagaagattcggcgacaagctgaacttcagacagaagctgctgggcagcggcgtgaagcagaccctgaacttcgacctgctgaagctggccggcgacgtggagagcaaccccggccccaacctgtgggccgcccagagatacggcagagagctgagaagaatgagcgacgagttcgtggacagcttcaagaagggcggcagcggcgtgaagcagaccctgaacttcgacctgctgaagctggccggcgacgtggagagcaaccccggcccccccgccgagctggaggtggagtgcgccacccagctgagaagattcggcgacaagctgaacttcagacagaagctgctgggcagcggcgtgaagcagaccctgaacttcgacctgctgaagctggccggcgacgtggagagcaaccccggccccaacctgtgggccgcccagagatacggcagagagctgagaagaatgagcgacgagttcgtggacagcttcaagaagggcggcagcggcgtgaagcagaccctgaacttcgacctgctgaagctggccggcgacgtggagagcaaccccggcccccccgccgagctggaggtggagtgcgccacccagctgagaagattcggcgacaagctgaacttcagacagaagctgctgggcagcggcgtgaagcagaccctgaacttcgacctgctgaagctggccggcgacgtggagagcaaccccggccccaacctgtgggccgcccagagatacggcagagagctgagaagaatgagcgacgagttcgtggacagcttcaagaagggcggcagcggcgtgaagcagaccctgaacttcgacctgctgaagctggccggcgacgtggagagcaaccccggcccccccgccgagctggaggtggagtgcgccacccagctgagaagattcggcgacaagctgaacttcagacagaagctgctgggcagcggcgtgaagcagaccctgaacttcgacctgctgaagctggccggcgacgtggagagcaaccccggccccaacctgtgggccgcccagagatacggcagagagctgagaagaatgagcgacgagttcgtggacagcttcaagaagggcggcagcggcgtgaagcagaccctgaacttcgacctgctgaagctggccggcgacgtggagagcaaccccggcccccccgccgagctggaggtggagtgcgccacccagctgagaagattcggcgacaagctgaacttcagacagaagctgctgggcagcggcgtgaagcagaccctgaacttcgacctgctgaagctggccggcgacgtggagagcaaccccggccccaacctgtgggccgcccagagatacggcagagagctgagaagaatgagcgacgagttcgtggacagcttcaagaagggcggcagcggcgtgaagcagaccctgaacttcgacctgctgaagctggccggcgacgtggagagcaaccccggcccccccgccgagctggaggtggagtgcgccacccagctgagaagattcggcgacaagctgaacttcagacagaagctgctgggcagcggcgtgaagcagaccctgaacttcgacctgctgaagctggccggcgacgtggagagcaaccccggccccaacctgtgggccgcccagagatacggcagagagctgagaagaatgagcgacgagttcgtggacagcttcaagaagggcggcagcggcgtgaagcagaccctgaacttcgacctgctgaagctggccggcgacgtggagagcaaccccggcccccccgccgagctggaggtggagtgcgccacccagctgagaagattcggcgacaagctgaacttcagacagaagctgctgggcagcggcgtgaagcagaccctgaacttcgacctgctgaagctggccggcgacgtggagagcaaccccggccccaacctgtgggccgcccagagatacggcagagagctgagaagaatgagcgacgagttcgtggacagcttcaagaagggcggcagcggcgtgaagcagaccctgaacttcgacctgctgaagctggccggcgacgtggagagcaaccccggcccccccgccgagctggaggtggagtgcgccacccagctgagaagattcggcgacaagctgaacttcagacagaagctgctgggcagcggcgtgaagcagaccctgaacttcgacctgctgaagctggccggcgacgtggagagcaaccccggccccaacctgtgggccgcccagagatacggcagagagctgagaagaatgagcgacgagttcgtggacagcttcaagaagggcggcagcggcgtgaagcagaccctgaacttcgacctgctgaagctggccggcgacgtggagagcaaccccggccccggcaagcccatccccaaccccctgctgggcctggacagcacc

SEQ ID NO: 267 - DNA, 1575 bp, Artificial Sequence
  Synthetic: (Noxa-F2A-BadBH3-F2A)^5_cV5,(Noxa-F2A-BadBH3-F2A)^5_cV5_DX
atgcccgccgagctggaggtggagtgcgccacccagctgagaagattcggcgacaagctgaacttcagacagaagctgctgggcagcggcgtgaagcagaccctgaacttcgacctgctgaagctggccggcgacgtggagagcaaccccggccccaacctgtgggccgcccagagatacggcagagagctgagaagaatgagcgacgagttcgtggacagcttcaagaagggcggcagcggcgtgaagcagaccctgaacttcgacctgctgaagctggccggcgacgtggagagcaaccccggcccccccgccgagctggaggtggagtgcgccacccagctgagaagattcggcgacaagctgaacttcagacagaagctgctgggcagcggcgtgaagcagaccctgaacttcgacctgctgaagctggccggcgacgtggagagcaaccccggccccaacctgtgggccgcccagagatacggcagagagctgagaagaatgagcgacgagttcgtggacagcttcaagaagggcggcagcggcgtgaagcagaccctgaacttcgacctgctgaagctggccggcgacgtggagagcaaccccggcccccccgccgagctggaggtggagtgcgccacccagctgagaagattcggcgacaagctgaacttcagacagaagctgctgggcagcggcgtgaagcagaccctgaacttcgacctgctgaagctggccggcgacgtggagagcaaccccggccccaacctgtgggccgcccagagatacggcagagagctgagaagaatgagcgacgagttcgtggacagcttcaagaagggcggcagcggcgtgaagcagaccctgaacttcgacctgctgaagctggccggcgacgtggagagcaaccccggcccccccgccgagctggaggtggagtgcgccacccagctgagaagattcggcgacaagctgaacttcagacagaagctgctgggcagcggcgtgaagcagaccctgaacttcgacctgctgaagctggccggcgacgtggagagcaaccccggccccaacctgtgggccgcccagagatacggcagagagctgagaagaatgagcgacgagttcgtggacagcttcaagaagggcggcagcggcgtgaagcagaccctgaacttcgacctgctgaagctggccggcgacgtggagagcaaccccggcccccccgccgagctggaggtggagtgcgccacccagctgagaagattcggcgacaagctgaacttcagacagaagctgctgggcagcggcgtgaagcagaccctgaacttcgacctgctgaagctggccggcgacgtggagagcaaccccggccccaacctgtgggccgcccagagatacggcagagagctgagaagaatgagcgacgagttcgtggacagcttcaagaagggcggcagcggcgtgaagcagaccctgaacttcgacctgctgaagctggccggcgacgtggagagcaaccccggccccggcaagcccatccccaaccccctgctgggcctggacagcacc

SEQ ID NO: 268 - DNA, 3105 bp, Artificial Sequence; identical to SEQ ID NO: 266
  Synthetic: (Noxa-F2A-BadBH3-F2A)^10_cV5

SEQ ID NO: 269 - DNA, 963 bp, Artificial Sequence
  Synthetic: (Puma-F2A-BimBH3-F2A)^3_cV5_DX
atggaggagcagtgggctagagaaattggcgcgcaactgagacgcatggccgacgaccttaacgctcaatacgaaagaagggggtcgggcgtgaaacagaccttgaatttcgatctgctcaaactggctggtgatgtggagagcaacccggggcctgacatgagacccgaaatatggattgctcaggaactgcggagaatcggagacgaattcaatgcgtattatgccagacgcgggagcggagtgaaacagacccttaactttgacctcctcaagctcgcaggggatgtggaaagcaatcctggtcccgaagagcaatgggccagagaaatcggcgcccaactgcgacgcatggccgatgatctgaatgcccagtacgaacgtaggggttccggtgtgaagcaaaccctcaactttgatttattaaaactcgccggtgacgtcgagagcaatcccggcccggatatgcgcccagaaatttggatagcccaagagctgagaagaataggcgacgagtttaacgcctactatgccagacggggcagcggcgtgaaacaaactctgaatttcgacctgctgaagctagcaggcgatgtggaaagcaatcccgggccggaagaacaatgggccagagaaatcggagcccagctgcgtagaatggcagacgatttaaacgcccagtatgagaggaggggcagtggcgttaaacagaccctgaattttgatctgctgaaacttgccggcgatgtggaatcgaaccccggccccgatatgagaccagagatctggatcgcccaggaactgaggcgtatcggtgatgaatttaatgcctactatgccaggagaggctctggtgttaagcagaccctgaatttcgatctgttaaagctggccggcgatgtggagtccaaccccgggcctggaaaacctatccccaaccccctactgggactcgacagcacc

SEQ ID NO: 270 - DNA, 579 bp, Artificial Sequence; identical to SEQ ID NO: 250
  Synthetic: (SuperPumaBH3.F2A)^3_cV5_DNA2.0

SEQ ID NO: 271 - DNA, 963 bp, Artificial Sequence
  Synthetic: (Puma-F2A-BimBH3-F2A)^3_cV5_DX_DNA2.0
atggaagaacaatgggctagggaaatcggagcacaactgagaagaatggcagacgatctgaacgcccagtacgagcgccggggctcaggggtcaaacagacccttaacttcgatttgctgaagctcgccggggatgtggagtcaaatccggggcctgatatgcggcctgaaatttggatcgcacaggaactccgccgcattggggatgaattcaatgcgtactatgccaggaggggaagcggcgtgaagcagaccctgaactttgacttgctgaaactggccggtgacgtcgagtctaaccctggacctgaggaacagtgggccagggaaattggagcccagctgcggcggatggccgatgacctcaacgcccaatacgagcgcagaggcagcggggtcaagcagactctcaattttgatctcctcaagctggccggcgatgtcgagtccaatccgggaccggacatgaggccggagatttggattgcccaagagctgcgccggatcggggacgaattcaacgcctactacgcgcggcggggttccggagtgaagcaaactttgaatttcgaccttctgaaattggccggcgacgtggagtcgaacccgggtccggaggagcagtgggcccgcgagatcggcgcgcagctcagacgcatggccgacgacctgaacgcacagtacgaacgcaggggctcgggagttaagcagaccttgaacttcgatctcctgaagcttgctggagatgtggaatccaaccctggtccggacatgcggccagaaatctggatcgcccaggaactgcggcgcatcggcgacgagttcaacgcttactacgcccgccggggttcgggcgtgaaacaaaccctgaatttcgatcttctgaagctggcgggggacgtggagagcaaccccggacccggaaagcccatcccaaaccccctgctgggtctggactccacc

SEQ ID NO: 272 - DNA, 810 bp, Artificial Sequence; identical to SEQ ID NO: 251
  Synthetic: (SuperPumaBH3.F2A)^5_cV5_DNA2.0

SEQ ID NO: 273 - DNA, 810 bp, Artificial Sequence; identical to SEQ ID NO: 248
  Synthetic: (pumaBH3.F2A)^5_cV5_DNA2.0

SEQ ID NO: 274 - DNA, 810 bp, Artificial Sequence; identical to SEQ ID NO: 252
  Synthetic: (KittyCatBH3.F2A)^5_cV5_DNA2.0

SEQ ID NO: 275 - DNA, 1728 bp, Artificial Sequence
  Synthetic: KittyCatBH3.F2A)^10_cV5_DNA2.0
atgcagtgggctagggaaatcggtgcacaagagagaagggaagcggacgacgagaacgcacagtacgagcgccgccggcaggggagcggagtcaaacagacccttaactttgatctgctgaaactcgccggcgacgtggaatccaacccgggtccgcagtgggcgcgcgaaattggggcgcaggagcgccgcgaagcggatgacgaaaacgctcagtacgaacgtcggcggcagggaagcggcgtgaagcagacgctgaattttgaccttttgaaactggccggagatgtggagagcaaccctggaccgcaatgggccagagagattggggcccaagaacggcgagaagccgacgacgagaacgcccagtacgaacgccggcgccagggctctggagtgaaacagaccttgaacttcgacctcttgaaattggccggagatgtcgaatcaaaccctggtcctcagtgggcccgggagattggcgcacaagagcgcagagaagctgacgatgaaaatgcgcaatacgaaagacggcgccaaggttctggcgtgaaacaaactctcaacttcgacttgctgaagcttgcgggggatgtggaatcaaacccgggaccccagtgggcgagggaaataggggcacaggaaagaagagaagcagatgatgaaaacgcccaatatgagcgccggcggcaagggtccggagtgaagcaaactttgaatttcgatctcctcaagctggcgggggacgtcgagtctaatcctgggccacaatgggcccgcgaaattggagcacaggaacgccgcgaggccgacgacgagaacgcccaatatgaaagaaggcgccagggatccggagtcaagcaaacactgaactttgacctcttgaagctcgctggcgatgtcgagtccaatcccggcccacagtgggcgcgcgagattggagctcaagagcggcgggaagcagacgacgaaaacgcgcagtatgaacgccggagacagggctcgggggtcaagcagaccctgaacttcgatctgctaaagctggccggtgacgtcgagtctaaccccggtcctcaatgggcacgggaaatcggggcgcaagagcggcgcgaggcagacgacgagaacgcgcaatatgaacgcagacggcaggggtccggcgtcaagcagactttaaatttcgacctcctcaagttggcaggggatgtggaatcgaaccccggaccacagtgggccagggagatcggagcccaggaacggagagaagccgatgacgagaatgcccagtacgaaaggcgccgccaggggtcgggggtgaaacagactttgaacttcgaccttctgaaactggctggggacgttgagagcaatccgggacctcagtgggcccgagagatcggcgcccaggaaagaagagaggctgatgacgaaaatgcccaatacgagcgtcgcagacagggttcgggtgtgaagcagactctgaacttcgatctgctcaagctcgccggggacgtggagtcgaacccggggccccaatgggcgagagaaattggtgcccaggagcgaagagaggccgatgatgagaacgctcaatacgaacgcaggcgacagggctccggtgtcaagcaaaccctcaacttcgatttgctcaagcttgccggggatgtcgaaagcaacccgggcccggggaagccgatcccgaaccccctgctgggtctggattccact

SEQ ID NO: 276 - DNA, 1575 bp, Artificial Sequence
  Synthetic: (pumaBH3.F2A)^10_cV5_DNA2.0
atggaagaacaatgggcaagggaaatcggggcccagttgcgaagaatggctgacgacctcaatgctcaatacgaacgcaggggatctggagtcaaacaaaccctgaacttcgacctcctgaaactcgcgggggatgtggaatcgaacccaggtccagaggagcaatgggcccgcgaaatcggtgcgcagctgcgtcgcatggcagatgaccttaacgcacaatacgaacggcgcggatccggggttaagcaaactctgaatttcgatctcttgaaattggcgggagatgtggaaagcaaccctggacccgaggagcagtgggctcgggaaatcggagcgcagttacggcgcatggcggacgacctgaacgcgcaatacgaaagacgcgggtcgggagtcaagcagaccttgaactttgacttgctgaagctcgcgggcgatgtggagtccaacccgggtccggaggagcaatgggcacgggagattggagcccaactgcgacgcatggccgacgatctgaacgcccaatacgagcggcggggctccggtgtcaagcaaaccctcaacttcgatttgctcaaactggccggggatgtcgagtcgaaccccggaccggaagaacagtgggcgagagagattggtgcacagctcagaagaatggccgatgatctcaacgcgcagtacgaacggagaggttccggcgtgaagcagaccctcaattttgacctcctgaagcttgccggcgatgtcgagagcaaccccggccccgaggaacagtgggcccgggaaattggggcacagctgcgccggatggcggacgatctcaatgcgcagtacgagcggagaggatcaggggtgaagcaaactctcaactttgatctgctgaagctggccggtgacgtggagtctaacccagggcccgaggaacagtgggcccgggagatcggcgcccagctgaggcggatggccgatgacttgaacgcccagtacgaaaggcggggatccggagtaaagcagactttgaatttcgaccttcttaagttggccggggacgtggaatcaaacccaggaccggaggaacagtgggccagggagatcggtgcccagctcaggaggatggctgacgacctcaacgcgcagtatgaaagaagagggtccggagtgaagcagactcttaacttcgatctcctgaagctggctggtgatgtggagagcaatccggggcccgaagaacaatgggccagagaaattggcgcgcagttgcggcggatggctgatgacctgaacgcacagtacgagaggcggggcagcggagtgaaacagaccctgaattttgatcttctgaagttggcgggcgacgtggaatccaaccccgggccggaagaacagtgggcacgcgagattggcgctcagctgcgcagaatggcagacgacttgaacgctcagtacgaacgccggggctcgggggtgaagcagacgctgaactttgatctcctcaaactcgccggcgacgtcgaaagcaatcctggccccggaaagcccatccccaaccccctgctgggtctggactccacc

SEQ ID NO: 277 - DNA, 1575 bp, Artificial Sequence
  Synthetic: (Puma-F2A-BimBH3-F2A)^5_cV5_DNA2.0
atggaagaacaatgggcgcgggaaatcggggcgcaactgagaagaatggcagatgatctcaatgcccagtatgaacgccggggtagcggggtcaagcagactttgaatttcgatctccttaagctcgctggagatgtggagtccaaccctggacccgatatgaggcctgaaatctggatcgcgcaggaactgaggcgcatcggcgatgaattcaatgcatactacgcccgccggggctctggcgttaagcaaacactgaacttcgacctcctgaagctggccggggatgtggaaagtaatccgggtcccgaagaacaatgggcacgggaaattggagcccagctccgccggatggcagacgatctgaacgcacaatacgagaggcgggggtcgggagtgaagcaaaccctgaactttgacttgcttaagctggctggggacgtggagagcaatcctggaccagacatgcgcccagagatttggattgctcaggaactgcggagaatcggggatgagttcaatgcgtattacgcccggcggggctccggcgtgaagcagactctgaacttcgaccttctgaagttggctggcgatgtggaatcaaaccccggcccggaggaacagtgggcgagggaaatcggcgctcagcttagacggatggccgacgacctcaacgcgcaatacgagcgccggggctcaggcgtgaagcagacgctcaactttgacctcttgaaactggcgggggacgtggagtcgaacccgggacctgatatgcggccggagatctggattgcgcaggagctgcgccgcatcggagatgaattcaacgcctattacgcgcgcagaggatccggcgtcaaacagactctcaatttcgacctcctgaagctggccggtgacgtggaatccaatcccggccctgaagaacagtgggccagagagatcggtgctcagcttcgccgcatggccgatgacctgaacgctcagtacgaacggcggggatccggagtaaaacagaccctgaattttgatctgctgaagctcgctggcgacgtcgaatcgaaccctggcccggatatgcgccctgaaatctggatcgctcaggagctccgccgcattggcgacgaatttaacgcctactatgcccggcgcggatcgggggtgaaacagactcttaatttcgacttgctcaaacttgcgggagatgtcgaatctaaccccggaccagaggagcaatgggcccgcgagatcggagcacagctgcggaggatggctgacgacttgaacgcgcagtatgagcgccgcggttcgggggtcaaacaaactctaaacttcgacttactgaagcttgccggcgacgtggaaagcaaccctggtcccgacatgcggcccgaaatttggatcgcccaggagctgaggagaatcggcgacgagttcaacgcgtactacgccagacgcggctccggagtcaagcaaactcttaacttcgatctgttgaaactcgcgggtgatgtcgagagcaacccgggccctggaaagccgatccctaacccgctgctcggcctggactccact

SEQ ID NO: 278 - DNA, 1575 bp, Artificial Sequence
  Synthetic: (SuperPumaBH3.F2A)^10_cV5_DNA2.0
atgcaatgggcacgagagattggtgctcaactcagacggattggtgacgacctcaacgcccagtacgagcggaggcggcaaggctccggtgtgaagcaaaccctgaacttcgatttgctcaagctggctggagatgtcgagagcaaccccgggcctcaatgggcgagggagatcggagcccagcttagaaggataggcgacgatctgaatgcacagtatgaaagacggcggcagggatccggagtcaaacagactctgaactttgacctcctgaagctggccggagatgtggaaagcaacccgggtcctcagtgggcacgcgaaatcggagctcagctgcgcaggattggtgatgatctgaacgcacagtacgaacgacgccgccaggggagcggagtcaagcaaaccttgaactttgatctgctgaagcttgccggcgatgtggaatccaaccctggaccccagtgggctcgcgaaattggcgcccagctgaggaggatcggcgacgacttgaacgcccaatatgaacgccggaggcagggctccggagtgaaacaaaccctcaactttgatttgcttaagttggccggggacgtggagtctaacccgggcccccagtgggccagagagatcggcgcgcaactcagaaggattggcgacgacctgaacgcgcagtatgagaggcggagacagggcagcggcgtgaagcagaccttaaacttcgacctgttgaagttggctggcgatgtcgaatcgaaccctggcccacaatgggcccgggagattggagctcagttgcggagaatcggtgatgacctgaatgcgcaatatgaacgcagacggcaggggtccggggtgaaacagaccctcaatttcgacttgctgaagctcgccggggatgtggaatcgaatccgggtccacaatgggcccgcgaaatcggggcccaactccgccggatcggcgatgatctcaacgcacaatacgaacgccgccggcagggctcgggcgtgaagcaaactctgaatttcgatcttcttaagctcgctggtgatgtggagtcaaaccccggcccgcaatgggcgcgcgaaatcggagcacaacttcggcggatcggagatgaccttaatgctcaatacgagaggcggcggcaaggttcaggggtgaagcaaacgctgaactttgacctcctcaagttggcgggcgacgtcgaaagcaatcctggtccgcagtgggccagagagatcggcgctcagctccgacgcattggcgatgaccttaacgcacagtacgaacggcgcagacagggctcaggagtgaagcagactctcaacttcgatctgctcaaactggcgggtgacgtggagagtaacccgggacctcaatgggcgagagaaatcggtgcccagctgcgccgcatcggggacgatctcaatgcccaatacgaaagacggcgccaaggatccggggtcaagcagacgcttaatttcgacctcttgaagctggctggtgacgtcgagtccaacccaggccctggaaagcccatccccaacccgctgctcggactggactcaact

SEQ ID NO: 279 - DNA, 504 bp, Artificial Sequence
  Synthetic: (KittyCatBH3.F2A)^3_cV5
atgcagtgggccagagagattggtgcccaagaaaggagagaagcggatgacgaaaacgctcagtacgagaggcgcagacaaggctcgggagtcaagcagactctgaacttcgatcttctgaagctggctggcgatgtggaaagcaacccaggaccgcagtgggcgcgcgagatcggagcccaggagaggagggaggccgacgacgaaaatgcacagtacgaaagaaggcgccagggctccggagtgaagcagaccctcaactttgacttgctcaagctggccggcgacgtggagagcaaccctggcccgcaatgggctagagaaatcggagctcaggagcggcgggaagcagacgacgagaatgcgcagtatgagcgccggcggcagggaagcggtgtcaagcaaaccctgaactttgatctgctcaaactggccggggatgtggaatcgaaccccggaccggggaagcccatccccaacccgcttctgggcctggactccacc

SEQ ID NO: 280 - DNA, 486 bp, Artificial Sequence
  Synthetic: (KittyCatBH3.P2A)^3_cV5
atgcagtgggccagagagattggtgcccaagaaaggagagaagcggatgacgaaaacgctcagtacgagaggcgcagacaaggaagcggagctactaacttcagcctgctgaagcaggctggagacgtggaggagaaccctggacctcagtgggcgcgcgagatcggagcccaggagaggagggaggccgacgacgaaaatgcacagtacgaaagaaggcgccagggaagcggagctactaacttcagcctgctgaagcaggctggagacgtggaggagaaccctggacctcaatgggctagagaaatcggagctcaggagcggcgggaagcagacgacgagaatgcgcagtatgagcgccggcggcagggaagcggtgtcaagcaaaccctgaactttgatctgctcaaactggccggggatgtggaatcgaaccccggaccggggaagcccatccccaacccgcttctgggcctggactccacc

SEQ ID NO: 281 - DNA, 411 bp, Artificial Sequence
  Synthetic: PumaBH3(x3.P2A).v5_miR122
atggaggagcaatgggctagagagatcggcgcacagctgcggcgcatggccgatgatctgaacgcccaatacgagaggagaggaagcggagctactaacttcagcctgctgaagcaggctggagacgtggaggagaaccctggacctgaggaacaatgggcgcgcgaaatcggtgcccagctccgccggatggcagacgacctgaacgcgcagtacgagcggcggggaagcggagctactaacttcagcctgctgaagcaggctggagacgtggaggagaaccctggacctgaagaacagtgggccagggaaattggagctcagctgcggagaatggccgacgacctcaacgcccagtacgaacggcgcggaaaacctatcccgaacccactcttgggcctggactccacc

SEQ ID NO: 282 - DNA, 351 bp, Artificial Sequence
  Synthetic: (PUMA BH3.GGGSx3)x3.V5
atggaggagcaatgggctagagagatcggcgcacagctgcggcgcatggccgatgatctgaacgcccaatacgagaggagaggtggcggaagtggtggcggaagtggtggcggaagtgaggagcaatgggctagagagatcggcgcacagctgcggcgcatggccgatgatctgaacgcccaatacgagaggagaggtggcggaagtggtggcggaagtggtggcggaagtgaggagcaatgggctagagagatcggcgcacagctgcggcgcatggccgatgatctgaacgcccaatacgagcggcgcggaaaacctatcccgaacccactcttgggcctggactccacc

SEQ ID NO: 283 - DNA, 351 bp, Artificial Sequence
  Synthetic: (PUMA BH3.GGGSx3)x3.V5_DX
atggaggagcagtgggctagagagatcggggcacagctgcggcgcatggctgacgacctgaacgctcaatacgagcgcagaggaggcggatccggtggcggaagcggtggaggaagtgaggagcaatgggctagagagatcggagcacagctgcggcgcatggccgacgatcttaacgcacaatacgaaaggagagggggcggaagtggtggcggaagtggcggcggaagtgaggagcaatgggctagagaaatcggcgcacagctgcggcgcatggccgatgatctgaatgcccagtacgaacggcgcggaaaacctatcccgaacccactcttgggactggactccacc

SEQ ID NO: 284 - DNA, 351 bp, Artificial Sequence; identical to SEQ ID NO: 282
  Synthetic: PUMA BH3.GGGSx3.PUMA BH3.V5

SEQ ID NO: 285 - DNA, 411 bp, Artificial Sequence; identical to SEQ ID NO: 281
  Synthetic: PumaBH3(x3.P2A).v5_miR122

SEQ ID NO: 286 - protein, 54 aa, Artificial Sequence
  Synthetic: hum.BID(61-104).FLAG
MGNRSSHSRLGRIEADSESQEDIIRNIARHLAQVGDSMDRSIPPGMDYKDDDDK

SEQ ID NO: 287 - DNA, 162 bp, Artificial Sequence
  Synthetic: hum.BID(61-104).FLAG
atgggcaaccgcagcagccactcccgcttgggaagaatagaggcagattctgaaagtcaagaagacatcatccggaatattgccaggcacctcgcccaggtcggggacagcatggaccgtagcatccctccgggcatggattacaaggacgatgatgacaag

SEQ ID NO: 288 - protein, 46 aa, Artificial Sequence
  Synthetic: hum.BID(61-104) without FLAG tag
MGNRSSHSRLGRIEADSESQEDIIRNIARHLAQVGDSMDRSIPPGM

SEQ ID NO: 289 - protein, 145 aa, Artificial Sequence
  Synthetic: hum.tBID(61-195).FLAG
MGNRSSHSRLGRIEADSESQEDIIRNIARHLAQVGDSMDRSIPPGLVNGLALQLRNTSRSEEDRNRDLATALEQLLQAYPRDMEKEKTMLVLALLLAKKVASHTPSLLRDVFHTTVNFINQNLRTYVRSLARNGMDMDYKDDDDK

SEQ ID NO: 290 - DNA, 435 bp, Artificial Sequence
  Synthetic: hum.tBID(61-195).FLAG
atgggcaaccgcagcagccactcccgcttgggaagaatagaggcagattctgaaagtcaagaagacatcatccggaatattgccaggcacctcgcccaggtcggggacagcatggaccgtagcatccctccgggcctggtgaacggcctggccctgcagctcaggaacaccagccggtcggaggaggaccggaacagggacctggccactgccctggagcagctgctgcaggcctaccctagagacatggagaaggagaagaccatgctggtgctggccctgctgctggccaagaaggtggccagtcacacgccgtccttgctccgtgatgtctttcacacaacagtgaattttattaaccagaacctacgcacctacgtgaggagcttagccagaaatgggatggacatggattacaaggacgatgatgacaag

SEQ ID NO: 291 - protein, 137 aa, Artificial Sequence
  Synthetic: hum.tBID(61-195) without FLAG tag
MGNRSSHSRLGRIEADSESQEDIIRNIARHLAQVGDSMDRSIPPGLVNGLALQLRNTSRSEEDRNRDLATALEQLLQAYPRDMEKEKTMLVLALLLAKKVASHTPSLLRDVFHTTVNFINQNLRTYVRSLARNGMDM

SEQ ID NO: 292 - protein, 129 aa, Artificial Sequence
  Synthetic: hum.tBID(77-195).FLAG
MESQEDIIRNIARHLAQVGDSMDRSIPPGLVNGLALQLRNTSRSEEDRNRDLATALEQLLQAYPRDMEKEKTMLVLALLLAKKVASHTPSLLRDVFHTTVNFINQNLRTYVRSLARNGMDMDYKDDDDK

SEQ ID NO: 293 - DNA, 387 bp, Artificial Sequence
  Synthetic: hum.tBID(77-195).FLAG
atggaaagtcaagaagacatcatccggaatattgccaggcacctcgcccaggtcggggacagcatggaccgtagcatccctccgggcctggtgaacggcctggccctgcagctcaggaacaccagccggtcggaggaggaccggaacagggacctggccactgccctggagcagctgctgcaggcctaccctagagacatggagaaggagaagaccatgctggtgctggccctgctgctggccaagaaggtggccagtcacacgccgtccttgctccgtgatgtctttcacacaacagtgaattttattaaccagaacctacgcacctacgtgaggagcttagccagaaatgggatggacatggattacaaggacgatgatgacaag

SEQ ID NO: 294 - protein, 121 aa, Artificial Sequence
  Synthetic: hum.tBID(77-195) without FLAG tag
MESQEDIIRNIARHLAQVGDSMDRSIPPGLVNGLALQLRNTSRSEEDRNRDLATALEQLLQAYPRDMEKEKTMLVLALLLAKKVASHTPSLLRDVFHTTVNFINQNLRTYVRSLARNGMDM

SEQ ID NO: 295 - RNA, 23 nt, Artificial Sequence
  Synthetic: miR-142-3p)
uguaguguuuccuacuuuaugga

SEQ ID NO: 296 - RNA, 21 nt, Artificial Sequence
  Synthetic: miR-142-5p
cauaaaguagaaagcacuacu

SEQ ID NO: 297 - RNA, 87 nt, Artificial Sequence
  Synthetic: miR-142
gacagugcagucacccauaaaguagaaagcacuacuaacagcacuggaggguguaguguuuccuacuuuauggaugaguguacugug

SEQ ID NO: 298 - RNA, 23 nt, Artificial Sequence
  Synthetic: miR-142-3p binding site
uccauaaaguaggaaacacuaca

SEQ ID NO: 299 - RNA, 21 nt, Artificial Sequence
  Synthetic: miR-142-5p binding site
aguagugcuuucuacuuuaug

SEQ ID NO: 300 - DNA, 429 bp, Artificial Sequence
  Synthetic: Puma-BH3 Multimers Codon optimized
atggaggagcagtgggcgcgggagataggggcccagctaaggcggatggccgacgacctaaacgcccaatacgaaaggaggggctcgggggtcaaacagaccctcaatttcgacctcctcaagctcgcgggagacgtcgagagcaaccccggccccgaggagcagtgggcgcgcgaaataggggcccagctccggcgcatggccgacgacctcaacgcgcaatacgagaggcgcggcagcggggtaaagcaaacgttgaacttcgacctcctcaagctcgcaggggacgtggagtccaaccccgggcccgaagaacaatgggcccgggaaatcggcgcccagctgcgccgtatggctgacgacctcaacgcgcagtatgaacgccgggggaagcccatccccaaccccctgctcggcctcgatagcacg

SEQ ID NO: 301 - DNA, 429 bp, Artificial Sequence
  Synthetic: Puma-BH3 Multimers Codon optimized
atggaggagcagtgggcccgcgagataggcgcccagctccgtaggatggcggacgatctaaacgcccagtacgagaggcggggcagcggggtcaaacagacattgaatttcgacctcttgaagctcgccggcgacgtggagagcaaccccgggcccgaggagcagtgggcgcgggagatcggagcccaactcaggagaatggccgacgacctcaacgcccagtacgagcgacgcggtagcggggtaaagcaaaccctcaacttcgacctcctcaagctcgccggggacgttgagtccaatcccgggcccgaagaacagtgggcccgggagataggcgcccagctgcgtcgtatggccgacgatctgaacgcccagtacgagcggagagggaagcccatcccgaacccgttgctggggctggacagcacc

SEQ ID NO: 302 - DNA, 429 bp, Artificial Sequence
  Synthetic: Puma-BH3 Multimers Codon optimized
atggaggaacagtgggcccgcgagatcggcgcccaactccggcggatggccgacgatctcaacgcccagtacgagaggcggggctccggggttaagcaaaccctcaatttcgacctcctcaagcttgccggggacgtcgaaagtaaccccggcccggaggaacagtgggcccgggagataggggcgcagctacgcaggatggccgacgatctcaacgcccagtacgagaggagggggtcgggggtcaagcagaccctcaacttcgacctactcaagctcgccggcgacgtggagagcaaccccgggcccgaagaacagtgggcccgggagatcggggcccagctgagacggatggccgatgacctgaacgctcagtacgagcggcgtgggaagcccatccccaaccccctgctgggtttagacagcacc

SEQ ID NO: 303 - DNA, 429 bp, Artificial Sequence
  Synthetic: Puma-BH3 Multimers Codon optimized
atggaggaacagtgggcccgcgagatcggcgcccagctccgccgcatggcggacgatcttaacgcccaatacgagaggagggggtccggcgtcaagcagaccctcaacttcgacctcctcaaactcgccggagacgtcgagtccaaccccggtcccgaagaacagtgggcccgggaaatcggggcccagctccgccgcatggcagacgatctcaacgcccagtacgagcggcgcgggtccggggtcaagcagactctcaacttcgatcttctcaagttagcgggggacgtggagtccaatccaggtccggaggagcagtgggcccgggagataggggcccagctccgccgaatggccgacgacctgaacgctcaatatgagcgccgggggaaacccatccccaacccgctgctcgggctggatagcact

SEQ ID NO: 304 - DNA, 429 bp, Artificial Sequence
  Synthetic: Puma-BH3 Multimers Codon optimized
atggaggagcagtgggcaagggagataggagctcagctcaggcggatggccgacgacctcaacgcgcagtacgaacggcggggatccggagtcaaacagacattgaatttcgaccttctcaaactcgccggcgacgttgagagcaatcccgggcccgaggaacagtgggcgcgggaaatcggcgcccagctaaggcggatggccgacgacctaaacgcccaatacgagcggcgggggtccggcgtgaagcagaccctaaacttcgacctcctgaagcttgccggggacgtggagagcaatcccggccccgaagaacagtgggcccgggagatcggggcccagctgcggcgcatggctgacgacctcaacgcccagtacgagcggcgggggaagcccatccccaacccgctcctgggtctggacagcaca

SEQ ID NO: 305 - DNA, 429 bp, Artificial Sequence
  Synthetic: Puma-BH3 Multimers Codon optimized
atggaggaacagtgggccagggaaatcggggcccagctaaggaggatggccgacgacctaaacgcccagtacgaacggcgaggtagcggggtcaagcagactctcaacttcgacctcttgaaactcgccggggacgtcgagtcgaatccaggccccgaggagcagtgggcacgagaaataggggcccagctacgccgcatggcggacgacctcaacgctcaatacgagcgaagaggatccggcgtaaaacagacgttgaacttcgacctcctcaagctcgccggggacgtagagtccaatccgggccctgaggaacagtgggcccgggagatcggggcccagctgcgccgaatggcggacgatctgaatgcccagtatgagaggagggggaagcccatcccaaatccactgctgggtctggattcgaca

SEQ ID NO: 306 - DNA, 429 bp, Artificial Sequence
  Synthetic: Puma-BH3 Multimers Codon optimized
atggaggagcagtgggcgcgagagatcggcgcccagctccgtaggatggcagacgacttaaacgcccaatacgaacgccgggggagcggcgtcaaacagacgctcaacttcgacttactaaaactagccggcgacgttgagagcaatcccgggcccgaggagcagtgggcccgggagataggcgcgcagcttcgccgcatggcggacgacctcaacgcccaatacgagcgccgcgggtccggggtcaagcagacgctcaacttcgacctcctcaaactggccggagacgtggagagcaaccccggccccgaggagcagtgggcccgcgaaatcggggcccagctgcgcagaatggcggacgacctgaacgcgcagtatgagcgacgggggaagcccatcccgaaccccctgctcggactcgactccact

SEQ ID NO: 307 - DNA, 429 bp, Artificial Sequence
  Synthetic: Puma-BH3 Multimers Codon optimized
atggaggagcagtgggccagggagatcggcgcacagctccgccgcatggcggacgacctcaacgcccaatacgaacgacgggggtccggggtcaaacagacgctcaacttcgacctccttaaactcgccggcgacgtagagtctaaccccggccccgaggagcagtgggcccgggagataggggcccagctccggcggatggccgacgatctcaacgcccagtacgagcgtagggggagcggcgttaagcaaacgcttaatttcgacctcctcaagctcgcgggcgacgtcgagtcaaaccccgggccagaggagcagtgggcccgtgagatcggtgcccagctgaggcgaatggccgatgacctgaacgcccagtatgagcgccgtgggaagcccattccgaatcctctcctgggtctggacagcacc

SEQ ID NO: 308 - DNA, 429 bp, Artificial Sequence
  Synthetic: Puma-BH3 Multimers Codon optimized
atggaggaacagtgggctcgcgagatcggggctcagctccgtaggatggccgacgatctcaacgcccagtacgagcgcagggggagcggcgtcaagcagaccttgaatttcgacctcctcaagctcgccggagacgtcgagtccaacccagggcccgaggagcagtgggcccgcgagatcggagcccagctccggaggatggcagacgacttgaacgcacagtacgagcgccgggggtccggggttaagcaaaccctcaacttcgacctccttaagctggcaggcgacgtggagtcgaatcccgggcccgaggagcagtgggccagggagatcggcgcacagctgcggcgcatggccgacgacctgaacgcgcagtatgagcgccgaggtaagcccatccccaaccccctgcttgggctggactccacc

SEQ ID NO: 309 - DNA, 429 bp, Artificial Sequence
  Synthetic: Puma-BH3 Multimers Codon optimized
atggaggagcagtgggcccgagagatcggcgcccagctcaggcggatggccgacgaccttaacgcccagtacgagcggcgggggagcggggtcaagcagacccttaatttcgaccttctcaaactggccggggacgtcgagtcgaaccccgggccagaggagcagtgggccagggagatcggagcccaattacgacggatggccgacgacctcaacgcccaatacgagcggagggggtccggagtcaaacagaccctcaacttcgatctcttgaagctcgcaggagacgtcgaaagcaatcccgggcccgaagaacagtgggcccgggagataggggcacagctccgcaggatggccgacgatctgaacgcccagtacgagcgtaggggtaaacctatcccaaacccacttctggggctggacagcact

SEQ ID NO: 310 - DNA, 429 bp, Artificial Sequence
  Synthetic: Puma-BH3 Multimers Codon optimized
atggaagaacagtgggctcgcgagatcggcgctcagctccgacggatggccgacgacttgaacgcgcagtacgagcgccgggggagcggagtcaagcagacactcaacttcgacctcctaaagttggcgggcgacgtggagagcaacccggggcccgaggagcagtgggcgagggagataggcgcccagctgcgccggatggccgacgacttgaacgctcaatacgagcggagggggtccggcgtcaagcagacgcttaatttcgacctcctcaagctcgccggcgacgtggaatccaaccccggcccggaggagcagtgggcccgagaaatcggagcccaactgcggaggatggctgacgacctgaacgcccagtacgagcgccgaggaaagccgatccccaaccccctgctgggactggacagcacg

SEQ ID NO: 311 - DNA, 429 bp, Artificial Sequence
  Synthetic: Puma-BH3 Multimers Codon optimized
atggaggagcagtgggcccgggaaatcggggcccagttacgcaggatggccgacgatctaaacgcccaatacgagaggaggggctcgggggtaaaacagaccctcaatttcgatttgctcaaactcgccggcgacgtcgagagtaacccgggccccgaggagcagtgggcccgcgagatcggggcgcagctccggcggatggcagacgacctcaacgcgcagtacgaacgccggggctccggcgtcaagcaaacgttgaacttcgacctcctcaaactcgccggggacgtagagagcaaccccgggcccgaggagcagtgggctcgtgagattggcgcccagctacgccgtatggccgacgacctcaacgcccagtacgagaggaggggtaagccgatccccaaccccctgctggggctggactccacc

SEQ ID NO: 312 - DNA, 429 bp, Artificial Sequence
  Synthetic: Puma-BH3 Multimers Codon optimized
atggaggaacagtgggcgcgagagatcggggcccagctcaggcggatggccgacgatctcaacgcccagtacgaacggaggggtagcggggtaaagcaaactctaaacttcgatctcctcaagctcgccggcgacgtagagtccaatccggggcccgaggagcagtgggcgcgggagatcggcgcccagctccggaggatggcagacgatctcaacgcccagtacgagcggagaggcagcggggtcaaacagaccctcaacttcgatctcctaaagctcgccggggacgtggagagcaaccccgggcccgaggagcagtgggcccgcgaaatcggtgcccagcttcgacgtatggccgatgatctgaacgcccaatacgagcggcgcggcaaacccattcccaatccgctgctcgggctggactccacc

SEQ ID NO: 313 - DNA, 429 bp, Artificial Sequence
  Synthetic: Puma-BH3 Multimers Codon optimized
atggaggagcagtgggcccgggaaatcggagcccaactacggcgcatggccgacgacctcaacgcccaatacgagcggaggggctcgggagtcaagcagactctaaatttcgacctcctcaagctcgcgggcgacgtcgagtccaaccccggtcccgaagaacagtgggcacgagagatcggcgcccagctccggcgaatggcggacgaccttaacgcccagtacgagcggcgggggagcggggtcaagcaaacactcaacttcgacctactcaagctcgccggggacgtcgagagcaatcccgggcccgaggaacagtgggccagggagattggggcccagctgaggaggatggcggacgacctgaacgcccagtacgagaggcgaggcaagccgatccccaatcccctgctgggcctggattccacc

SEQ ID NO: 314 - DNA, 429 bp, Artificial Sequence
  Synthetic: Puma-BH3 Multimers Codon optimized
atggaggagcagtgggcgcgcgagataggcgcccaactccgtaggatggccgacgatcttaacgcccagtacgagcgccggggtagcggggtgaagcagaccctcaacttcgaccttctcaagcttgccggggacgtagaaagcaatcccgggcccgaggagcagtgggccagggaaatcggggcccagctccgccgtatggccgacgacctcaacgcgcagtacgagcgccgagggtcgggagtcaagcagaccctcaacttcgatctcctcaagctcgccggcgacgtggaaagcaacccgggccccgaagaacagtgggcccgggagattggggcacagctgaggaggatggccgacgatctgaacgcccagtacgaacggcggggcaagcccatcccaaacccgctgctaggactggactcaacg

SEQ ID NO: 315 - DNA, 429 bp, Artificial Sequence
  Synthetic: Puma-BH3 Multimers Codon optimized
atggaggagcagtgggcacgagaaatcggcgcccagcttcgtcggatggccgacgatctcaacgcgcagtacgagaggcggggctcgggagtcaaacagaccctcaacttcgacctcctcaagctcgccggcgacgtcgagtccaacccgggcccggaagaacagtgggccagagagatcggggcccagctaaggcgtatggccgacgatctcaacgcccagtacgagcggaggggctccggcgtcaagcagacccttaatttcgatctcttgaagctcgccggggacgtcgaaagcaatcccgggcccgaggaacagtgggcccgggaaatcggtgcacagctcaggcgcatggcggatgatctcaacgcccaatacgagcgccggggcaaacccatacctaaccccctgctcggtctggactccacc

SEQ ID NO: 316 - DNA, 429 bp, Artificial Sequence
  Synthetic: Puma-BH3 Multimers Codon optimized
atggaggagcagtgggcgcgggagatcggggcgcagctaaggaggatggcggacgatctcaacgcgcagtacgaaaggcgcggcagcggcgtgaagcagacgctcaacttcgacctactcaagctcgcgggggacgtcgaatcgaaccccggcccggaggaacagtgggccagggagatcggcgcccagctacggcgtatggccgacgacctcaacgcccaatacgagaggagggggtcgggagtcaaacagaccctaaacttcgacctcctcaagctcgccggggacgtcgagtccaaccccggtcccgaggagcagtgggccagggaaatcggggcgcaactgcgccgcatggccgacgatctgaacgcccagtatgagcgcaggggcaagccgatcccgaatccgctgctaggtctggactccacc

SEQ ID NO: 317 - DNA, 429 bp, Artificial Sequence
  Synthetic: Puma-BH3 Multimers Codon optimized
atggaggagcagtgggcccgcgagatcggcgcacagctccgacgaatggccgacgatctcaacgcccaatacgaacggcgggggagcggagtcaagcagactttaaacttcgacctcctcaagcttgccggggacgtggaaagtaaccccggaccggaggagcagtgggcccgcgagataggagcgcagctcaggcgcatggccgacgatctcaacgcccaatacgagcggaggggaagcggggtaaaacagacgctcaacttcgacctcctcaaattagccggcgacgtggagagcaaccccgggcccgaggagcagtgggcccgcgagataggggcccaactgcggcgcatggcggacgacctgaacgcccagtacgagaggcggggcaagccgatccctaaccccctgctggggttggactccacc

SEQ ID NO: 318 - DNA, 429 bp, Artificial Sequence
  Synthetic: Puma-BH3 Multimers Codon optimized
atggaagaacagtgggcacgggagatcggcgcacagctaaggaggatggccgacgaccttaacgcgcagtacgagcgcagagggagcggcgtcaagcagacgctcaatttcgaccttctcaagctcgcgggggacgttgagtccaatcccggacccgaggagcagtgggcccgcgagataggggcccagctccggcggatggcagacgatctcaacgcccaatacgagaggagggggtcgggggtcaaacagacccttaacttcgacctcctcaagctcgccggggacgtcgagagtaaccccggaccggaggagcagtgggcccgggaaattggcgcccaactcaggcggatggccgatgatctcaacgcccagtacgaacgtcggggtaagcccatcccgaaccccctgctggggctggactcgacc

SEQ ID NO: 319 - DNA, 429 bp, Artificial Sequence
  Synthetic: Puma-BH3 Multimers Codon optimized
atggaggagcagtgggcaagggagataggcgcacagctccgtcggatggccgacgacctgaacgcccaatacgagcggagagggtccggggtcaagcagaccctcaatttcgacttgctcaagctggcaggggacgtcgaaagcaaccccggcccggaggagcagtgggcgcgcgagatcggcgcccagcttaggcggatggccgacgacttaaacgcgcaatacgagcgccgcggcagcggggtcaaacagaccctaaacttcgacctcctcaagctcgccggcgacgtggagagcaaccccggccccgaagaacagtgggcccgcgagatcggggcgcagctgcgtagaatggccgacgatctgaacgcccagtatgagaggcggggcaaacctatcccgaatccactgctgggcctggacagcaca

SEQ ID NO: 320 - DNA, 429 bp, Artificial Sequence
  Synthetic: Puma-BH3 Multimers Codon optimized
atggaggaacagtgggctcgcgagataggcgcccagctccgcagaatggccgacgatcttaacgcccaatacgaacggcgggggtccggggtcaagcagacgttaaacttcgacctcctcaaactcgccggggacgtggagtccaaccccgggcccgaggagcagtgggcgcgcgagatcggggcccagctccgacggatggccgacgacctcaacgcgcagtacgagcgcagaggaagcggggtcaagcagaccctcaacttcgatctcctcaagttggcgggcgacgttgaaagcaaccccggaccggaggagcaatgggcccgcgagatcggggcccaactcaggaggatggcggacgacctgaacgcccagtacgaacggagggggaaacctatccccaaccctctactggggctggactctacg

SEQ ID NO: 321 - DNA, 429 bp, Artificial Sequence
  Synthetic: Puma-BH3 Multimers Codon optimized
atggaggaacagtgggcccgcgagatcggcgcccaactccgtaggatggccgacgatctcaacgcccagtacgagaggagggggagcggggtcaagcagacgctcaacttcgacctcctcaagctcgccggggacgtcgagtccaacccgggtccagaggagcagtgggcgagggaaatcggcgcccagctccgtcggatggccgacgacctaaacgcgcagtacgagaggaggggttccggcgttaaacaaacgctcaacttcgacctcctcaaactcgccggggacgtcgagagcaaccccggacccgaggagcagtgggctcgggagattggggcccagctgaggcggatggccgatgacctgaatgcgcagtacgagcgccgcggaaaacccatccctaacccgctgctcggcctggactccacc

SEQ ID NO: 322 - DNA, 429 bp, Artificial Sequence
  Synthetic: Puma-BH3 Multimers Codon optimized
atggaggagcagtgggcccgagaaataggggcccagctcaggaggatggccgacgacctcaacgcccaatacgaaaggagggggtcgggcgtcaagcagacccttaatttcgacttgcttaagcttgccggggacgtagaatccaacccgggacccgaggagcagtgggcccgagaaatcggagcccagctccgccgaatggcggacgatctcaacgcccaatacgagaggaggggatccggcgtcaagcagacgctcaatttcgacctcctcaaactcgccggcgacgttgaatcaaacccggggccggaagaacagtgggccagagagatcggcgcacagctgcgccgaatggccgatgacctgaacgcccagtacgagcgccggggcaagcccataccgaaccccctcctgggcctggactccacc

SEQ ID NO: 323 - DNA, 429 bp, Artificial Sequence
  Synthetic: Puma-BH3 Multimers Codon optimized
atggaggagcagtgggcccgcgaaatcggcgcccagctccggagaatggccgacgaccttaacgcccagtacgaaaggaggggcagcggggtcaaacagacgctaaacttcgacctcctcaagctcgccggggacgttgagtccaaccccgggccggaggaacagtgggcgcgggagatcggggcgcagcttaggcgaatggccgacgacctaaacgcccagtacgagcgcagggggtcgggcgtcaagcagaccctcaacttcgacctccttaaactcgcgggggacgtcgagagcaatccggggccggaagaacagtgggctcgggagattggcgcccagctgcggcgcatggccgatgacctgaacgcccagtatgaacgccgcggtaagcccatcccgaacccgctgctgggtctggatagcacc

SEQ ID NO: 324 - DNA, 429 bp, Artificial Sequence
  Synthetic: Puma-BH3 Multimers Codon optimized
atggaggaacagtgggcccgggagatcggcgcccagctcaggcggatggcggacgacctcaacgcccagtacgagcggagggggagcggggtcaagcaaaccctcaatttcgacctcctcaagttggccggcgacgtggagtcgaaccccgggcccgaggaacagtgggcccgcgagataggggcacagctccgcaggatggccgacgaccttaacgcgcagtacgagaggaggggctcgggagttaagcagaccctcaatttcgatctcctcaaactagccggggacgtagaaagcaaccccggccccgaggagcagtgggcccgagaaatcggcgcgcagctgagaaggatggctgacgacctgaacgcgcagtatgagagacgggggaagccgatccccaaccccctcctcgggttggactccacc

SEQ ID NO: 325 - DNA, 47 bp, Artificial Sequence
  Synthetic: 5 UTR
gggaaataagagagaaaagaagagtaagaagaaatataagagccacc

SEQ ID NO: 326 - DNA, 164 bp, Artificial Sequence
  Synthetic: 3 UTR with miR-142-3p
tgataatagtccataaagtaggaaacactacagctggagcctcggtggccatgcttcttgccccttgggcccaaacaccattgtcacactccatccccccagcccctcctccccttcctgcacccgtacccccgtggtctttgaataaagtctgagtgggcggc

SEQ ID NO: 327 - DNA, 47 bp, Artificial Sequence; identical to SEQ ID NO: 325
  Synthetic: 5'UTR-001

SEQ ID NO: 328 - DNA, 47 bp, Artificial Sequence
  Synthetic: 5'UTR-002
gggagatcagagagaaaagaagagtaagaagaaatataagagccacc

SEQ ID NO: 329 - DNA, 145 bp, Artificial Sequence
  Synthetic: 5'UTR-003
ggaataaaagtctcaacacaacatatacaaaacaaacgaatctcaagcaatcaagcattctacttctattgcagcaatttaaatcatttcttttaaagcaaaagcaattttctgaaaattttcaccatttacgaacgatagcaac

SEQ ID NO: 330 - RNA, 42 nt, Artificial Sequence
  Synthetic: 5'UTR-004
gggagacaagcuuggcauuccgguacuguugguaaagccacc

SEQ ID NO: 331 - DNA, 47 bp, Artificial Sequence; identical to SEQ ID NO: 328
  Synthetic: 5'UTR-005

SEQ ID NO: 332 - DNA, 145 bp, Artificial Sequence; identical to SEQ ID NO: 329
  Synthetic: 5'UTR-006

SEQ ID NO: 333 - RNA, 42 nt, Artificial Sequence; identical to SEQ ID NO: 330
  Synthetic: 5'UTR-007

SEQ ID NO: 334 - DNA, 47 bp, Artificial Sequence
  Synthetic: 5'UTR-008
gggaattaacagagaaaagaagagtaagaagaaatataagagccacc

SEQ ID NO: 335 - DNA, 47 bp, Artificial Sequence
  Synthetic: 5'UTR-009
gggaaattagacagaaaagaagagtaagaagaaatataagagccacc

SEQ ID NO: 336 - DNA, 47 bp, Artificial Sequence
  Synthetic: 5'UTR-010
gggaaataagagagtaaagaacagtaagaagaaatataagagccacc

SEQ ID NO: 337 - DNA, 47 bp, Artificial Sequence
  Synthetic: 5'UTR-011
gggaaaaaagagagaaaagaagactaagaagaaatataagagccacc

SEQ ID NO: 338 - DNA, 47 bp, Artificial Sequence
  Synthetic: 5'UTR-012
gggaaataagagagaaaagaagagtaagaagatatataagagccacc

SEQ ID NO: 339 - DNA, 47 bp, Artificial Sequence
  Synthetic: 5'UTR-013
gggaaataagagacaaaacaagagtaagaagaaatataagagccacc

SEQ ID NO: 340 - DNA, 47 bp, Artificial Sequence
  Synthetic: 5'UTR-014
gggaaattagagagtaaagaacagtaagtagaattaaaagagccacc

SEQ ID NO: 341 - DNA, 47 bp, Artificial Sequence
  Synthetic: 5'UTR-015
gggaaataagagagaatagaagagtaagaagaaatataagagccacc

SEQ ID NO: 342 - DNA, 47 bp, Artificial Sequence
  Synthetic: 5'UTR-016
gggaaataagagagaaaagaagagtaagaagaaaattaagagccacc

SEQ ID NO: 343 - DNA, 47 bp, Artificial Sequence
  Synthetic: 5'UTR-017
gggaaataagagagaaaagaagagtaagaagaaatttaagagccacc

SEQ ID NO: 344 - DNA, 92 bp, Artificial Sequence; identical to SEQ ID NO: 72
  Synthetic: 5'UTR-018

SEQ ID NO: 345 - DNA, 142 bp, Artificial Sequence
  Synthetic: 142-3p 5'UTR-001
tgataatagtccataaagtaggaaacactacagctggagcctcggtggccatgcttcttgccccttgggcctccccccagcccctcctccccttcctgcacccgtacccccgtggtctttgaataaagtctgagtgggcggc

SEQ ID NO: 346 - DNA, 142 bp, Artificial Sequence
  Synthetic: 142-3p 5'UTR-002
tgataataggctggagcctcggtggctccataaagtaggaaacactacacatgcttcttgccccttgggcctccccccagcccctcctccccttcctgcacccgtacccccgtggtctttgaataaagtctgagtgggcggc

SEQ ID NO: 347 - DNA, 142 bp, Artificial Sequence
  Synthetic: 142-3p 5'UTR-003
tgataataggctggagcctcggtggccatgcttcttgccccttccataaagtaggaaacactacatgggcctccccccagcccctcctccccttcctgcacccgtacccccgtggtctttgaataaagtctgagtgggcggc

SEQ ID NO: 348 - DNA, 142 bp, Artificial Sequence
  Synthetic: 142-3p 5'UTR-004
tgataataggctggagcctcggtggccatgcttcttgccccttgggcctccccccagtccataaagtaggaaacactacacccctcctccccttcctgcacccgtacccccgtggtctttgaataaagtctgagtgggcggc

SEQ ID NO: 349 - DNA, 142 bp, Artificial Sequence
  Synthetic: 142-3p 5'UTR-005
tgataataggctggagcctcggtggccatgcttcttgccccttgggcctccccccagcccctcctccccttctccataaagtaggaaacactacactgcacccgtacccccgtggtctttgaataaagtctgagtgggcggc

SEQ ID NO: 350 - DNA, 142 bp, Artificial Sequence
  Synthetic: 142-3p 5'UTR-006
tgataataggctggagcctcggtggccatgcttcttgccccttgggcctccccccagcccctcctccccttcctgcacccgtaccccctccataaagtaggaaacactacagtggtctttgaataaagtctgagtgggcggc

SEQ ID NO: 351 - DNA, 142 bp, Artificial Sequence
  Synthetic: 142-3p 5'UTR-007
tgataataggctggagcctcggtggccatgcttcttgccccttgggcctccccccagcccctcctccccttcctgcacccgtacccccgtggtctttgaataaagttccataaagtaggaaacactacactgagtgggcggc

SEQ ID NO: 352 - DNA, 371 bp, Artificial Sequence
  Synthetic: 3'UTR-001
gcgcctgcccacctgccaccgactgctggaacccagccagtgggagggcctggcccaccagagtcctgctccctcactcctcgccccgccccctgtcccagagtcccacctgggggctctctccacccttctcagagttccagtttcaaccagagttccaaccaatgggctccatcctctggattctggccaatgaaatatctccctggcagggtcctcttcttttcccagagctccaccccaaccaggagctctagttaatggagagctcccagcacactcggagcttgtgctttgtctccacgcaaagcgataaataaaagcattggtggcctttggtctttgaataaagcctgagtaggaagtctaga

SEQ ID NO: 353 - DNA, 568 bp, Artificial Sequence
  Synthetic: 3'UTR-002
gcccctgccgctcccacccccacccatctgggccccgggttcaagagagagcggggtctgatctcgtgtagccatatagagtttgcttctgagtgtctgctttgtttagtagaggtgggcaggaggagctgaggggctggggctggggtgttgaagttggctttgcatgcccagcgatgcgcctccctgtgggatgtcatcaccctgggaaccgggagtggcccttggctcactgtgttctgcatggtttggatctgaattaattgtcctttcttctaaatcccaaccgaacttcttccaacctccaaactggctgtaaccccaaatccaagccattaactacacctgacagtagcaattgtctgattaatcactggccccttgaagacagcagaatgtccctttgcaatgaggaggagatctgggctgggcgggccagctggggaagcatttgactatctggaacttgtgtgtgcctcctcaggtatggcagtgactcacctggttttaataaaacaacctgcaacatctcatggtctttgaataaagcctgagtaggaagtctaga

SEQ ID NO: 354 - DNA, 289 bp, Artificial Sequence
  Synthetic: 3'UTR-003
acacactccacctccagcacgcgacttctcaggacgacgaatcttctcaatgggggggcggctgagctccagccaccccgcagtcactttctttgtaacaacttccgttgctgccatcgtaaactgacacagtgtttataacgtgtacatacattaacttattacctcattttgttatttttcgaaacaaagccctgtggaagaaaatggaaaacttgaagaagcattaaagtcattctgttaagctgcgtaaatggtctttgaataaagcctgagtaggaagtctaga

SEQ ID NO: 355 - DNA, 379 bp, Artificial Sequence
  Synthetic: 3'UTR-004
catcacatttaaaagcatctcagcctaccatgagaataagagaaagaaaatgaagatcaaaagcttattcatctgtttttctttttcgttggtgtaaagccaacaccctgtctaaaaaacataaatttctttaatcattttgcctcttttctctgtgcttcaattaataaaaaatggaaagaatctaatagagtggtacagcactgttatttttcaaagatgtgttgctatcctgaaaattctgtaggttctgtggaagttccagtgttctctcttattccacttcggtagaggatttctagtttcttgtgggctaattaaataaatcattaatactcttctaatggtctttgaataaagcctgagtaggaagtctaga

SEQ ID NO: 356 - DNA, 118 bp, Artificial Sequence
  Synthetic: 3'UTR-005
gctgccttctgcggggcttgccttctggccatgcccttcttctctcccttgcacctgtacctcttggtctttgaataaagcctgagtaggaaggcggccgctcgagcatgcatctaga

SEQ ID NO: 357 - DNA, 908 bp, Artificial Sequence
  Synthetic: 3'UTR-006
gccaagccctccccatcccatgtatttatctctatttaatatttatgtctatttaagcctcatatttaaagacagggaagagcagaacggagccccaggcctctgtgtccttccctgcatttctgagtttcattctcctgcctgtagcagtgagaaaaagctcctgtcctcccatcccctggactgggaggtagataggtaaataccaagtatttattactatgactgctccccagccctggctctgcaatgggcactgggatgagccgctgtgagcccctggtcctgagggtccccacctgggacccttgagagtatcaggtctcccacgtgggagacaagaaatccctgtttaatatttaaacagcagtgttccccatctgggtccttgcacccctcactctggcctcagccgactgcacagcggcccctgcatccccttggctgtgaggcccctggacaagcagaggtggccagagctgggaggcatggccctggggtcccacgaatttgctggggaatctcgtttttcttcttaagacttttgggacatggtttgactcccgaacatcaccgacgcgtctcctgtttttctgggtggcctcgggacacctgccctgcccccacgagggtcaggactgtgactctttttagggccaggcaggtgcctggacatttgccttgctggacggggactggggatgtgggagggagcagacaggaggaatcatgtcaggcctgtgtgtgaaaggaagctccactgtcaccctccacctcttcaccccccactcaccagtgtcccctccactgtcacattgtaactgaacttcaggataataaagtgtttgcctccatggtctttgaataaagcctgagtaggaaggcggccgctcgagcatgcatctaga

SEQ ID NO: 358 - DNA, 835 bp, Artificial Sequence
  Synthetic: 3'UTR-007
actcaatctaaattaaaaaagaaagaaatttgaaaaaactttctctttgccatttcttcttcttcttttttaactgaaagctgaatccttccatttcttctgcacatctacttgcttaaattgtgggcaaaagagaaaaagaaggattgatcagagcattgtgcaatacagtttcattaactccttcccccgctcccccaaaaatttgaatttttttttcaacactcttacacctgttatggaaaatgtcaacctttgtaagaaaaccaaaataaaaattgaaaaataaaaaccataaacatttgcaccacttgtggcttttgaatatcttccacagagggaagtttaaaacccaaacttccaaaggtttaaactacctcaaaacactttcccatgagtgtgatccacattgttaggtgctgacctagacagagatgaactgaggtccttgttttgttttgttcataatacaaaggtgctaattaatagtatttcagatacttgaagaatgttgatggtgctagaagaatttgagaagaaatactcctgtattgagttgtatcgtgtggtgtattttttaaaaaatttgatttagcattcatattttccatcttattcccaattaaaagtatgcagattatttgcccaaatcttcttcagattcagcatttgttctttgccagtctcattttcatcttcttccatggttccacagaagctttgtttcttgggcaagcagaaaaattaaattgtacctattttgtatatgtgagatgtttaaataaattgtgaaaaaaatgaaataaagcatgtttggttttccaaaagaacatat

SEQ ID NO: 359 - DNA, 297 bp, Artificial Sequence
  Synthetic: 3'UTR-008
cgccgccgcccgggccccgcagtcgagggtcgtgagcccaccccgtccatggtgctaagcgggcccgggtcccacacggccagcaccgctgctcactcggacgacgccctgggcctgcacctctccagctcctcccacggggtccccgtagccccggcccccgcccagccccaggtctccccaggccctccgcaggctgcccggcctccctccccctgcagccatcccaaggctcctgacctacctggcccctgagctctggagcaagccctgacccaataaaggctttgaacccat

SEQ ID NO: 360 - DNA, 602 bp, Artificial Sequence
  Synthetic: 3'UTR-009
ggggctagagccctctccgcacagcgtggagacggggcaaggaggggggttattaggattggtggttttgttttgctttgtttaaagccgtgggaaaatggcacaactttacctctgtgggagatgcaacactgagagccaaggggtgggagttgggataatttttatataaaagaagtttttccactttgaattgctaaaagtggcatttttcctatgtgcagtcactcctctcatttctaaaatagggacgtggccaggcacggtggctcatgcctgtaatcccagcactttgggaggccgaggcaggcggctcacgaggtcaggagatcgagactatcctggctaacacggtaaaaccctgtctctactaaaagtacaaaaaattagctgggcgtggtggtgggcacctgtagtcccagctactcgggaggctgaggcaggagaaaggcatgaatccaagaggcagagcttgcagtgagctgagatcacgccattgcactccagcctgggcaacagtgttaagactctgtctcaaatataaataaataaataaataaataaataaataaataaaaataaagcgagatgttgccctcaaa

SEQ ID NO: 361 - DNA, 785 bp, Artificial Sequence
  Synthetic: 3'UTR-010
ggccctgccccgtcggactgcccccagaaagcctcctgccccctgccagtgaagtccttcagtgagcccctccccagccagcccttccctggccccgccggatgtataaatgtaaaaatgaaggaattacattttatatgtgagcgagcaagccggcaagcgagcacagtattatttctccatcccctccctgcctgctccttggcacccccatgctgccttcagggagacaggcagggagggcttggggctgcacctcctaccctcccaccagaacgcaccccactgggagagctggtggtgcagccttcccctccctgtataagacactttgccaaggctctcccctctcgccccatccctgcttgcccgctcccacagcttcctgagggctaattctgggaagggagagttctttgctgcccctgtctggaagacgtggctctgggtgaggtaggcgggaaaggatggagtgttttagttcttgggggaggccaccccaaaccccagccccaactccaggggcacctatgagatggccatgctcaacccccctcccagacaggccctccctgtctccagggcccccaccgaggttcccagggctggagacttcctctggtaaacattcctccagcctcccctcccctggggacgccaaggaggtgggccacacccaggaagggaaagcgggcagccccgttttggggacgtgaacgttttaataatttttgctgaattcctttacaactaaataacacagatattgttataaataaaattgt

SEQ ID NO: 362 - DNA, 3001 bp, Artificial Sequence
  Synthetic: 3'UTR-011
atattaaggatcaagctgttagctaataatgccacctctgcagttttgggaacaggcaaataaagtatcagtatacatggtgatgtacatctgtagcaaagctcttggagaaaatgaagactgaagaaagcaaagcaaaaactgtatagagagatttttcaaaagcagtaatccctcaattttaaaaaaggattgaaaattctaaatgtctttctgtgcatattttttgtgttaggaatcaaaagtattttataaaaggagaaagaacagcctcattttagatgtagtcctgttggattttttatgcctcctcagtaaccagaaatgttttaaaaaactaagtgtttaggatttcaagacaacattatacatggctctgaaatatctgacacaatgtaaacattgcaggcacctgcattttatgttttttttttcaacaaatgtgactaatttgaaacttttatgaacttctgagctgtccccttgcaattcaaccgcagtttgaattaatcatatcaaatcagttttaattttttaaattgtacttcagagtctatatttcaagggcacattttctcactactattttaatacattaaaggactaaataatctttcagagatgctggaaacaaatcatttgctttatatgtttcattagaataccaatgaaacatacaacttgaaaattagtaatagtatttttgaagatcccatttctaattggagatctctttaatttcgatcaacttataatgtgtagtactatattaagtgcacttgagtggaattcaacatttgactaataaaatgagttcatcatgttggcaagtgatgtggcaattatctctggtgacaaaagagtaaaatcaaatatttctgcctgttacaaatatcaaggaagacctgctactatgaaatagatgacattaatctgtcttcactgtttataatacggatggattttttttcaaatcagtgtgtgttttgaggtcttatgtaattgatgacatttgagagaaatggtggctttttttagctacctctttgttcatttaagcaccagtaaagatcatgtctttttatagaagtgtagattttctttgtgactttgctatcgtgcctaaagctctaaatataggtgaatgtgtgatgaatactcagattatttgtctctctatataattagtttggtactaagtttctcaaaaaattattaacacatgaaagacaatctctaaaccagaaaaagaagtagtacaaattttgttactgtaatgctcgcgtttagtgagtttaaaacacacagtatcttttggttttataatcagtttctattttgctgtgcctgagattaagatctgtgtatgtgtgtgtgtgtgtgtgtgcgtttgtgtgttaaagcagaaaagacttttttaaaagttttaagtgataaatgcaatttgttaattgatcttagatcactagtaaactcagggctgaattataccatgtatattctattagaagaaagtaaacaccatctttattcctgccctttttcttctctcaaagtagttgtagttatatctagaaagaagcaattttgatttcttgaaaaggtagttcctgcactcagtttaaactaaaaataatcatacttggattttatttatttttgtcatagtaaaaattttaatttatatatatttttatttagtattatcttattctttgctatttgccaatcctttgtcatcaattgtgttaaatgaattgaaaattcatgccctgttcattttattttactttattggttaggatatttaaaggatttttgtatatataatttcttaaattaatattccaaaaggttagtggacttagattataaattatggcaaaaatctaaaaacaacaaaaatgatttttatacattctatttcattattcctctttttccaataagtcatacaattggtagatatgacttattttatttttgtattattcactatatctttatgatatttaagtataaataattaaaaaaatttattgtaccttatagtctgtcaccaaaaaaaaaaaattatctgtaggtagtgaaatgctaatgttgatttgtctttaagggcttgttaactatcctttattttctcatttgtcttaaattaggagtttgtgtttaaattactcatctaagcaaaaaatgtatataaatcccattactgggtatatacccaaaggattataaatcatgctgctataaagacacatgcacacgtatgtttattgcagcactattcacaatagcaaagacttggaaccaacccaaatgtccatcaatgatagacttgattaagaaaatgtgcacatatacaccatggaatactatgcagccataaaaaaggatgagttcatgtcctttgtagggacatggataaagctggaaaccatcattctgagcaaactattgcaaggacagaaaaccaaacactgcatgttctcactcataggtgggaattgaacaatgagaacacttggacacaaggtggggaacaccacacaccagggcctgtcatggggtggggggagtggggagggatagcattaggagatatacctaatgtaaatgatgagttaatgggtgcagcacaccaacatggcacatgtatacatatgtagcaaacctgcacgttgtgcacatgtaccctagaacttaaagtataattaaaaaaaaaaagaaaacagaagctatttataaagaagttatttgctgaaataaatgtgatctttcccattaaaaaaataaagaaattttggggtaaaaaaacacaatatattgtattcttgaaaaattctaagagagtggatgtgaagtgttctcaccacaaaagtgataactaattgaggtaatgcacatattaattagaaagattttgtcattccacaatgtatatatacttaaaaatatgttatacacaataaatacatacattaaaaaataagtaaatgta

SEQ ID NO: 363 - DNA, 1037 bp, Artificial Sequence
  Synthetic: 3'UTR-012
cccaccctgcacgccggcaccaaaccctgtcctcccacccctccccactcatcactaaacagagtaaaatgtgatgcgaattttcccgaccaacctgattcgctagattttttttaaggaaaagcttggaaagccaggacacaacgctgctgcctgctttgtgcagggtcctccggggctcagccctgagttggcatcacctgcgcagggccctctggggctcagccctgagctagtgtcacctgcacagggccctctgaggctcagccctgagctggcgtcacctgtgcagggccctctggggctcagccctgagctggcctcacctgggttccccaccccgggctctcctgccctgccctcctgcccgccctccctcctgcctgcgcagctccttccctaggcacctctgtgctgcatcccaccagcctgagcaagacgccctctcggggcctgtgccgcactagcctccctctcctctgtccccatagctggtttttcccaccaatcctcacctaacagttactttacaattaaactcaaagcaagctcttctcctcagcttggggcagccattggcctctgtctcgttttgggaaaccaaggtcaggaggccgttgcagacataaatctcggcgactcggccccgtctcctgagggtcctgctggtgaccggcctggaccttggccctacagccctggaggccgctgctgaccagcactgaccccgacctcagagagtactcgcaggggcgctggctgcactcaagaccctcgagattaacggtgctaaccccgtctgctcctccctcccgcagagactggggcctggactggacatgagagccccttggtgccacagagggctgtgtcttactagaaacaacgcaaacctctccttcctcagaatagtgatgtgttcgacgttttatcaaaggccccctttctatgttcatgttagttttgctccttctgtgtttttttctgaaccatatccatgttgctgacttttccaaataaaggttttcactcctctc

SEQ ID NO: 364 - DNA, 577 bp, Artificial Sequence
  Synthetic: 3'UTR-013
agaggcctgcctccagggctggactgaggcctgagcgctcctgccgcagagctggccgcgccaaataatgtctctgtgagactcgagaactttcatttttttccaggctggttcggatttggggtggattttggttttgttcccctcctccactctcccccaccccctccccgcccttttttttttttttttttaaactggtattttatctttgattctccttcagccctcacccctggttctcatctttcttgatcaacatcttttcttgcctctgtccccttctctcatctcttagctcccctccaacctggggggcagtggtgtggagaagccacaggcctgagatttcatctgctctccttcctggagcccagaggagggcagcagaagggggtggtgtctccaaccccccagcactgaggaagaacggggctcttctcatttcacccctccctttctcccctgcccccaggactgggccacttctgggtggggcagtgggtcccagattggctcacactgagaatgtaagaactacaaacaaaatttctattaaattaaattttgtgtctcc

SEQ ID NO: 365 - DNA, 2212 bp, Artificial Sequence
  Synthetic: 3'UTR-014
ctccctccatcccaacctggctccctcccacccaaccaactttccccccaacccggaaacagacaagcaacccaaactgaaccccctcaaaagccaaaaaatgggagacaatttcacatggactttggaaaatatttttttcctttgcattcatctctcaaacttagtttttatctttgaccaaccgaacatgaccaaaaaccaaaagtgcattcaaccttaccaaaaaaaaaaaaaaaaaaagaataaataaataactttttaaaaaaggaagcttggtccacttgcttgaagacccatgcgggggtaagtccctttctgcccgttgggcttatgaaaccccaatgctgccctttctgctcctttctccacaccccccttggggcctcccctccactccttcccaaatctgtctccccagaagacacaggaaacaatgtattgtctgcccagcaatcaaaggcaatgctcaaacacccaagtggcccccaccctcagcccgctcctgcccgcccagcacccccaggccctgggggacctggggttctcagactgccaaagaagccttgccatctggcgctcccatggctcttgcaacatctccccttcgtttttgagggggtcatgccgggggagccaccagcccctcactgggttcggaggagagtcaggaagggccacgacaaagcagaaacatcggatttggggaacgcgtgtcaatcccttgtgccgcagggctgggcgggagagactgttctgttccttgtgtaactgtgttgctgaaagactacctcgttcttgtcttgatgtgtcaccggggcaactgcctgggggcggggatgggggcagggtggaagcggctccccattttataccaaaggtgctacatctatgtgatgggtggggtggggagggaatcactggtgctatagaaattgagatgcccccccaggccagcaaatgttcctttttgttcaaagtctatttttattccttgatatttttctttttttttttttttttttgtggatggggacttgtgaatttttctaaaggtgctatttaacatgggaggagagcgtgtgcggctccagcccagcccgctgctcactttccaccctctctccacctgcctctggcttctcaggcctctgctctccgacctctctcctctgaaaccctcctccacagctgcagcccatcctcccggctccctcctagtctgtcctgcgtcctctgtccccgggtttcagagacaacttcccaaagcacaaagcagtttttccccctaggggtgggaggaagcaaaagactctgtacctattttgtatgtgtataataatttgagatgtttttaattattttgattgctggaataaagcatgtggaaatgacccaaacataatccgcagtggcctcctaatttccttctttggagttgggggaggggtagacatggggaaggggctttggggtgatgggcttgccttccattcctgccctttccctccccactattctcttctagatccctccataaccccactcccctttctctcacccttcttataccgcaaacctttctacttcctctttcattttctattcttgcaatttccttgcaccttttccaaatcctcttctcccctgcaataccatacaggcaatccacgtgcacaacacacacacacactcttcacatctggggttgtccaaacctcatacccactccccttcaagcccatccactctccaccccctggatgccctgcacttggtggcggtgggatgctcatggatactgggagggtgaggggagtggaacccgtgaggaggacctgggggcctctccttgaactgacatgaagggtcatctggcctctgctcccttctcacccacgctgacctcctgccgaaggagcaacgcaacaggagaggggtctgctgagcctggcgagggtctgggagggaccaggaggaaggcgtgctccctgctcgctgtcctggccctgggggagtgagggagacagacacctgggagagctgtggggaaggcactcgcaccgtgctcttgggaaggaaggagacctggccctgctcaccacggactgggtgcctcgacctcctgaatccccagaacacaacccccctgggctggggtggtctggggaaccatcgtgcccccgcctcccgcctactcctttttaagctt

SEQ ID NO: 366 - DNA, 729 bp, Artificial Sequence
  Synthetic: 3'UTR-015
ttggccaggcctgaccctcttggacctttcttctttgccgacaaccactgcccagcagcctctgggacctcggggtcccagggaacccagtccagcctcctggctgttgacttcccattgctcttggagccaccaatcaaagagattcaaagagattcctgcaggccagaggcggaacacacctttatggctggggctctccgtggtgttctggacccagcccctggagacaccattcacttttactgctttgtagtgactcgtgctctccaacctgtcttcctgaaaaaccaaggcccccttcccccacctcttccatggggtgagacttgagcagaacaggggcttccccaagttgcccagaaagactgtctgggtgagaagccatggccagagcttctcccaggcacaggtgttgcaccagggacttctgcttcaagttttggggtaaagacacctggatcagactccaagggctgccctgagtctgggacttctgcctccatggctggtcatgagagcaaaccgtagtcccctggagacagcgactccagagaacctcttgggagacagaagaggcatctgtgcacagctcgatcttctacttgcctgtggggaggggagtgacaggtccacacaccacactgggtcaccctgtcctggatgcctctgaagagagggacagaccgtcagaaactggagagtttctattaaaggtcatttaaacca

SEQ ID NO: 367 - DNA, 847 bp, Artificial Sequence
  Synthetic: 3'UTR-016
tcctccgggaccccagccctcaggattcctgatgctccaaggcgactgatgggcgctggatgaagtggcacagtcagcttccctgggggctggtgtcatgttgggctcctggggcgggggcacggcctggcatttcacgcattgctgccaccccaggtccacctgtctccactttcacagcctccaagtctgtggctcttcccttctgtcctccgaggggcttgccttctctcgtgtccagtgaggtgctcagtgatcggcttaacttagagaagcccgccccctccccttctccgtctgtcccaagagggtctgctctgagcctgcgttcctaggtggctcggcctcagctgcctgggttgtggccgccctagcatcctgtatgcccacagctactggaatccccgctgctgctccgggccaagcttctggttgattaatgagggcatggggtggtccctcaagaccttcccctaccttttgtggaaccagtgatgcctcaaagacagtgtcccctccacagctgggtgccaggggcaggggatcctcagtatagccggtgaaccctgataccaggagcctgggcctccctgaacccctggcttccagccatctcatcgccagcctcctcctggacctcttggcccccagccccttccccacacagccccagaagggtcccagagctgaccccactccaggacctaggcccagcccctcagcctcatctggagcccctgaagaccagtcccacccacctttctggcctcatctgacactgctccgcatcctgctgtgtgtcctgttccatgttccggttccatccaaatacactttctggaacaaa

SEQ ID NO: 368 - DNA, 110 bp, Artificial Sequence
  Synthetic: 3'UTR-017
gctggagcctcggtggccatgcttcttgccccttgggcctccccccagcccctcctccccttcctgcacccgtacccccgtggtctttgaataaagtctgagtgggcggc

SEQ ID NO: 369 - DNA, 119 bp, Artificial Sequence; identical to SEQ ID NO: 73
  Synthetic: 3'UTR-018

SEQ ID NO: 370 - protein, 143 aa, Artificial Sequence; identical to SEQ ID NO: 146
  Synthetic: Puma BH3(x3P2A) .v5

SEQ ID NO: 371 - DNA, 429 bp, Artificial Sequence; identical to SEQ ID NO: 244
  Synthetic: Puma BH3

SEQ ID NO: 372 - DNA, 568 bp, Artificial Sequence
  Synthetic: TandemPep.TOPK_codon optimized(5 UTR, ORF, 3 UTR)
tcaagcttttggaccctcgtacagaagctaatacgactcactatagggaaataagagagaaaagaagagtaagaagaaatataagagccaccatgatggaaggaatcagcaacttcaagaccccatccaagctgtccgagaagaaaaagggttccggagtgaagcagaccctgaacttcgatctgctcaagctcgccggggacgtggaaagcaaccctggtcccatggagggcatctcgaactttaagaccccctcgaagctttcggagaagaagaagggatccggcgtcaagcagactctgaatttcgacttgctgaagctcgcgggcgatgtggaatcaaacccggggcctatggaaggcatctccaacttcaaaactccgtccaagctgagcgagaaaaagaagggaaagcccattccgaaccctctgctgggactggacagcacctgataataggctggagcctcggtggccatgcttcttgccccttgggcctccccccagcccctcctccccttcctgcacccgtacccccgtggtctttgaataaagtctgagtgggcggc

SEQ ID NO: 373 - DNA, 568 bp, Artificial Sequence
  Synthetic: TandemPep.TOPK(5' UTR, ORF, 3' UTR)
tcaagcttttggaccctcgtacagaagctaatacgactcactatagggaaataagagagaaaagaagagtaagaagaaatataagagccaccatgatggaaggcatcagcaacttcaagaccccaagcaagctgagcgagaagaagaagggctccggcgtgaagcagaccttgaacttcgacctgctcaaacttgccggcgacgtggagagcaaccccggccccatggaggggatcagtaacttcaagacccccagcaagctgagcgagaagaagaagggtagcggcgtgaaacagaccctgaatttcgatctgctgaagctggccggcgacgtggagagcaaccccggccccatggagggcataagcaatttcaagacccccagcaagctgagcgaaaagaaaaagggcaagcccattcccaacccccttctgggccttgacagcacctgataataggctggagcctcggtggccatgcttcttgccccttgggcctccccccagcccctcctccccttcctgcacccgtacccccgtggtctttgaataaagtctgagtgggcggc

SEQ ID NO: 374 - DNA, 357 bp, Artificial Sequence
  Synthetic: TandemPep.TOPK_codon optimized(ORF)
atgatggaaggaatcagcaacttcaagaccccatccaagctgtccgagaagaaaaagggttccggagtgaagcagaccctgaacttcgatctgctcaagctcgccggggacgtggaaagcaaccctggtcccatggagggcatctcgaactttaagaccccctcgaagctttcggagaagaagaagggatccggcgtcaagcagactctgaatttcgacttgctgaagctcgcgggcgatgtggaatcaaacccggggcctatggaaggcatctccaacttcaaaactccgtccaagctgagcgagaaaaagaagggaaagcccattccgaaccctctgctgggactggacagcacc

SEQ ID NO: 375 - DNA, 357 bp, Artificial Sequence
  Synthetic: TandemPep.TOPK(ORF)
atgatggaaggcatcagcaacttcaagaccccaagcaagctgagcgagaagaagaagggctccggcgtgaagcagaccttgaacttcgacctgctcaaacttgccggcgacgtggagagcaaccccggccccatggaggggatcagtaacttcaagacccccagcaagctgagcgagaagaagaagggtagcggcgtgaaacagaccctgaatttcgatctgctgaagctggccggcgacgtggagagcaaccccggccccatggagggcataagcaatttcaagacccccagcaagctgagcgaaaagaaaaagggcaagcccattcccaacccccttctgggccttgacagcacc

SEQ ID NO: 376 - protein, 18 aa, Artificial Sequence
  Synthetic: Isolated TOPK inhibitory peptide
MEGISNFKTPSKLSEKKK

SEQ ID NO: 377 - protein, 119 aa, Artificial Sequence
  Synthetic: TOPK 3-peptide tandem with F2A linker
MMEGISNFKTPSKLSEKKKGSGVKQTLNFDLLKLAGDVESNPGPMEGISNFKTPSKLSEKKKGSGVKQTLNFDLLKLAGDVESNPGPMEGISNFKTPSKLSEKKKGKPIPNPLLGLDST

SEQ ID NO: 378 - protein, 113 aa, Artificial Sequence
  Synthetic: TOPK 3-peptide tandem with P2A linker
MMEGISNFKTPSKLSEKKKGSGATNFSLLKQAGDVEENPGPMEGISNFKTPSKLSEKKKGSGATNFSLLKQAGDVEENPGPMEGISNFKTPSKLSEKKKGKPIPNPLLGLDST

SEQ ID NO: 379 - DNA, 514 bp, Artificial Sequence
  Synthetic: TandemPep.Sall4,(5' UTR, ORF, 3' UTR)
tcaagcttttggaccctcgtacagaagctaatacgactcactatagggaaataagagagaaaagaagagtaagaagaaatataagagccaccatgatgagcagacgtaagcaggctaagccccagcatatcggcagcggcgtgaagcagaccctgaacttcgacctgctcaagctggccggcgatgtcgagtcaaaccccggccccatgagcagaagaaagcaggccaagccccagcacatcggtagcggagtgaaacagaccctgaacttcgacttactgaagctcgctggcgacgtggagagcaaccccggccccatgagcagaagaaagcaggccaagccccagcacatcggaaagcccatccccaaccccctgctgggcctggacagcacctgataataggctggagcctcggtggccatgcttcttgccccttgggcctccccccagcccctcctccccttcctgcacccgtacccccgtggtctttgaataaagtctgagtgggcggc

SEQ ID NO: 380 - DNA, 514 bp, Artificial Sequence
  Synthetic: TandemPep.Sall4_codon optimized,(5' UTR, ORF, 3' UTR)
tcaagcttttggaccctcgtacagaagctaatacgactcactatagggaaataagagagaaaagaagagtaagaagaaatataagagccaccatgatgagccgcagaaagcaggccaagcctcagcatatcggatccggcgtgaagcagaccctgaacttcgaccttctgaagctggccggcgatgtggaatccaacccggggcccatgtcccggaggaaacaagcgaagccacagcacatcggatcgggagtgaagcaaactctcaacttcgacttgctgaaactcgccggggatgtcgagtcaaatcccggccctatgagccgccggaagcaggctaagccgcagcacattggaaagcctatccccaacccgctgctgggtctggacagcacctgataataggctggagcctcggtggccatgcttcttgccccttgggcctccccccagcccctcctccccttcctgcacccgtacccccgtggtctttgaataaagtctgagtgggcggc

SEQ ID NO: 381 - DNA, 303 bp, Artificial Sequence
  Synthetic: TandemPep.Sall4,(ORF)
atgatgagcagacgtaagcaggctaagccccagcatatcggcagcggcgtgaagcagaccctgaacttcgacctgctcaagctggccggcgatgtcgagtcaaaccccggccccatgagcagaagaaagcaggccaagccccagcacatcggtagcggagtgaaacagaccctgaacttcgacttactgaagctcgctggcgacgtggagagcaaccccggccccatgagcagaagaaagcaggccaagccccagcacatcggaaagcccatccccaaccccctgctgggcctggacagcacc

SEQ ID NO: 382 - DNA, 303 bp, Artificial Sequence
  Synthetic: TandemPep.Sall4_codon optimized,(ORF,)
atgatgagccgcagaaagcaggccaagcctcagcatatcggatccggcgtgaagcagaccctgaacttcgaccttctgaagctggccggcgatgtggaatccaacccggggcccatgtcccggaggaaacaagcgaagccacagcacatcggatcgggagtgaagcaaactctcaacttcgacttgctgaaactcgccggggatgtcgagtcaaatcccggccctatgagccgccggaagcaggctaagccgcagcacattggaaagcctatccccaacccgctgctgggtctggacagcacc

SEQ ID NO: 383 - protein, 12 aa, Artificial Sequence
  Synthetic: isolated SALL4-inhibitory peptide
MSRRKQAKPQHI

SEQ ID NO: 384 - protein, 101 aa, Artificial Sequence
  Synthetic: SALL4-inhibitory 3-peptide tandem with F2A linker
MMSRRKQAKPQHIGSGVKQTLNFDLLKLAGDVESNPGPMSRRKQAKPQHIGSGVKQTLNFDLLKLAGDVESNPGPMSRRKQAKPQHIGKPIPNPLLGLDST

SEQ ID NO: 385 - protein, 95 aa, Artificial Sequence
  Synthetic: SALL4-inhibitory 3-peptide tandem with P2A linker
MMSRRKQAKPQHIGSGATNFSLLKQAGDVEENPGPMSRRKQAKPQHIGSGATNFSLLKQAGDVEENPGPMSRRKQAKPQHIGKPIPNPLLGLDST

SEQ ID NO: 386 - protein, 12 aa, Artificial Sequence
  Synthetic: Ras inhibitory peptide
HYPWFKARLYPL

SEQ ID NO: 387 - protein, 101 aa, Artificial Sequence
  Synthetic: Ras inhibitory peptide tandem-(3x)(GSG)F2A linker-V5 Tag(optional)
MHYPWFKARLYPLGSGVKQTLNFDLLKLAGDVESNPGPHYPWFKARLYPLGSGVKQTLNFDLLKLAGDVESNPGPHYPWFKARLYPLGKPIPNPLLGLDST

SEQ ID NO: 388 - protein, 95 aa, Artificial Sequence
  Synthetic: Ras inhibitory peptide tandem-(3x)(GSG) P2A linker-V5 Tag(optional)
MHYPWFKARLYPLGSGATNFSLLKQAGDVEENPGPHYPWFKARLYPLGSGATNFSLLKQAGDVEENPGPHYPWFKARLYPLGKPIPNPLLGLDST

SEQ ID NO: 389 - DNA, 514 bp, Artificial Sequence
  Synthetic: Ras inhibitory peptide tandem-(3x)
tcaagcttttggaccctcgtacagaagctaatacgactcactatagggaaataagagagaaaagaagagtaagaagaaatataagagccaccatgcactacccctggttcaaggccagactgtaccccctgggcagcggcgtgaagcagaccctgaacttcgacctcctgaagctggccggcgatgtggagagcaatcccggcccccactacccctggttcaaggccagactgtaccccctgggcagcggagtgaagcaaaccctaaactttgacctgctgaagctggccggcgacgtggaaagcaaccccggaccccactacccctggtttaaggcccgcctgtaccccctgggcaagcccatccccaatcccctgctgggcctggacagcacctgataataggctggagcctcggtggccatgcttcttgccccttgggcctccccccagcccctcctccccttcctgcacccgtacccccgtggtctttgaataaagtctgagtgggcggc

SEQ ID NO: 390 - DNA, 303 bp, Artificial Sequence
  Synthetic: Ras inhibitory peptide tandem-(3x) ORF
atgcactacccctggttcaaggccagactgtaccccctgggcagcggcgtgaagcagaccctgaacttcgacctcctgaagctggccggcgatgtggagagcaatcccggcccccactacccctggttcaaggccagactgtaccccctgggcagcggagtgaagcaaaccctaaactttgacctgctgaagctggccggcgacgtggaaagcaaccccggaccccactacccctggtttaaggcccgcctgtaccccctgggcaagcccatccccaatcccctgctgggcctggacagcacc

SEQ ID NO: 391 - DNA, 514 bp, Artificial Sequence
  Synthetic: Ras inhibitory peptide tandem-(3x) codon optimized
tcaagcttttggaccctcgtacagaagctaatacgactcactatagggaaataagagagaaaagaagagtaagaagaaatataagagccaccatgcattacccgtggtttaaggcccgcctgtatccactgggatccggggtcaagcagacccttaacttcgacctcctgaagctggccggagatgtggaaagcaacccgggtccccactacccctggttcaaagcgcggctgtaccccctgggatcgggcgtgaagcagactctcaacttcgacttgcttaagctggctggggacgtggagtccaatcctggcccacactacccttggttcaaggcccggctctaccctctcggaaagccgatcccgaaccccctgctgggcctggatagcacctgataataggctggagcctcggtggccatgcttcttgccccttgggcctccccccagcccctcctccccttcctgcacccgtacccccgtggtctttgaataaagtctgagtgggcggc

SEQ ID NO: 392 - DNA, 303 bp, Artificial Sequence
  Synthetic: Ras inhibitory peptide tandem-(3x) codon optimized ORF
atgcattacccgtggtttaaggcccgcctgtatccactgggatccggggtcaagcagacccttaacttcgacctcctgaagctggccggagatgtggaaagcaacccgggtccccactacccctggttcaaagcgcggctgtaccccctgggatcgggcgtgaagcagactctcaacttcgacttgcttaagctggctggggacgtggagtccaatcctggcccacactacccttggttcaaggcccggctctaccctctcggaaagccgatcccgaaccccctgctgggcctggatagcacc

SEQ ID NO: 393 - protein, 101 aa, Artificial Sequence
  Synthetic: TandemPep.P53 ORF
METFSDLWKLLPEGSGVKQTLNFDLLKLAGDVESNPGPETFSDLWKLLPEGSGVKQTLNFDLLKLAGDVESNPGPETFSDLWKLLPEGKPIPNPLLGLDST

SEQ ID NO: 394 - protein, 101 aa, Artificial Sequence
  Synthetic: TandemPep.p53.6S ORF
MLTFEHSWAQLTSGSGVKQTLNFDLLKLAGDVESNPGPLTFEHSWAQLTSGSGVKQTLNFDLLKLAGDVESNPGPLTFEHSWAQLTSGKPIPNPLLGLDST

SEQ ID NO: 395 - protein, 101 aa, Artificial Sequence
  Synthetic: TandemPep.p53.P1E6W ORF
METFEHWWAQLTSGSGVKQTLNFDLLKLAGDVESNPGPETFEHWWAQLTSGSGVKQTLNFDLLKLAGDVESNPGPETFEHWWAQLTSGKPIPNPLLGLDST

SEQ ID NO: 396 - protein, 101 aa, Artificial Sequence
  Synthetic: TandemPep.p53.P6W ORF
MLTFEHWWAQLTSGSGVKQTLNFDLLKLAGDVESNPGPLTFEHWWAQLTSGSGVKQTLNFDLLKLAGDVESNPGPLTFEHWWAQLTSGKPIPNPLLGLDST

SEQ ID NO: 397 - protein, 101 aa, Artificial Sequence
  Synthetic: TandemPep.p53.pDIQ ORF
METFEHWWSQLLSGSGVKQTLNFDLLKLAGDVESNPGPETFEHWWSQLLSGSGVKQTLNFDLLKLAGDVESNPGPETFEHWWSQLLSGKPIPNPLLGLDST

SEQ ID NO: 398 - protein, 101 aa, Artificial Sequence
  Synthetic: TandemPep.p53.pMI ORF
MTSFAEYWNLLSPGSGVKQTLNFDLLKLAGDVESNPGPTSFAEYWNLLSPGSGVKQTLNFDLLKLAGDVESNPGPTSFAEYWNLLSPGKPIPNPLLGLDST

SEQ ID NO: 399 - protein, 12 aa, Artificial Sequence
  Synthetic: pMI
TSFAEYWNLLSP

SEQ ID NO: 400 - protein, 12 aa, Artificial Sequence
  Synthetic: p53
ETFSDLWKLLPE

SEQ ID NO: 401 - protein, 12 aa, Artificial Sequence
  Synthetic: pDIQ
ETFEHWWSQLLS

SEQ ID NO: 402 - protein, 12 aa, Artificial Sequence
  Synthetic: p1E6W
ETFEHWWAQLTS

SEQ ID NO: 403 - protein, 12 aa, Artificial Sequence
  Synthetic: p536S
LTFEHSWAQLTS

SEQ ID NO: 404 - protein, 12 aa, Artificial Sequence
  Synthetic: P6W
LTFEHWWAQLTS

SEQ ID NO: 405 - DNA, 514 bp, Artificial Sequence
  Synthetic: TandemPep.P53(5UTR, ORF, 3UTR)
tcaagcttttggaccctcgtacagaagctaatacgactcactatagggaaataagagagaaaagaagagtaagaagaaatataagagccaccatggagacctttagcgacctgtggaagttgctgcccgagggcagcggcgtgaagcagaccctgaacttcgatctgctgaagttagccggggacgtggagagcaaccccggccccgagacattctcagacctctggaagctgctgcccgagggctctggcgtgaagcagaccctgaacttcgatttactgaagctggccggcgacgtcgagagcaaccccggccccgaaaccttcagcgacctgtggaagctgctgcctgagggcaagcccatccccaaccccctgctgggcctggacagcacctgataataggctggagcctcggtggccatgcttcttgccccttgggcctccccccagcccctcctccccttcctgcacccgtacccccgtggtctttgaataaagtctgagtgggcggc

SEQ ID NO: 406 - DNA, 303 bp, Artificial Sequence
  Synthetic: TandemPep.P53 ORF
atggagacctttagcgacctgtggaagttgctgcccgagggcagcggcgtgaagcagaccctgaacttcgatctgctgaagttagccggggacgtggagagcaaccccggccccgagacattctcagacctctggaagctgctgcccgagggctctggcgtgaagcagaccctgaacttcgatttactgaagctggccggcgacgtcgagagcaaccccggccccgaaaccttcagcgacctgtggaagctgctgcctgagggcaagcccatccccaaccccctgctgggcctggacagcacc

SEQ ID NO: 407 - DNA, 514 bp, Artificial Sequence
  Synthetic: TandemPep.P53.6S(5UTR, ORF, 3UTR)
tcaagcttttggaccctcgtacagaagctaatacgactcactatagggaaataagagagaaaagaagagtaagaagaaatataagagccaccatgctgaccttcgagcacagctgggctcagctgaccagcggcagcggcgttaagcaaaccctgaacttcgatttgctgaagctcgccggcgacgtggaaagcaaccctggccccctgaccttcgagcattcttgggctcagctgaccagcgggtctggcgtgaagcagaccctgaacttcgacctgttaaagctggccggagatgtggagagcaatcccggccccctgaccttcgagcacagttgggcccagctgaccagcggcaagcccatccccaaccccctgttgggcctggacagcacctgataataggctggagcctcggtggccatgcttcttgccccttgggcctccccccagcccctcctccccttcctgcacccgtacccccgtggtctttgaataaagtctgagtgggcggc

SEQ ID NO: 408 - DNA, 303 bp, Artificial Sequence
  Synthetic: TandemPep.P53.6S ORF
atgctgaccttcgagcacagctgggctcagctgaccagcggcagcggcgttaagcaaaccctgaacttcgatttgctgaagctcgccggcgacgtggaaagcaaccctggccccctgaccttcgagcattcttgggctcagctgaccagcgggtctggcgtgaagcagaccctgaacttcgacctgttaaagctggccggagatgtggagagcaatcccggccccctgaccttcgagcacagttgggcccagctgaccagcggcaagcccatccccaaccccctgttgggcctggacagcacc

SEQ ID NO: 409 - DNA, 514 bp, Artificial Sequence
  Synthetic: Tandem.Pep.P53.P1.E6W(5UTR, ORF, 3UTR)
tcaagcttttggaccctcgtacagaagctaatacgactcactatagggaaataagagagaaaagaagagtaagaagaaatataagagccaccatggagaccttcgagcactggtgggcgcaactgaccagcggcagcggcgtgaagcagaccctgaacttcgatctgctgaagttagccggcgacgtggagtcaaaccccggccccgagaccttcgagcactggtgggcccagctgacctctggcagcggcgtcaagcaaaccctgaacttcgaccttctgaagctggccggcgatgtggagagcaaccccggccccgagaccttcgagcactggtgggcccagctcacctcgggcaagcccatccccaaccccctgctgggtctggacagcacctgataataggctggagcctcggtggccatgcttcttgccccttgggcctccccccagcccctcctccccttcctgcacccgtacccccgtggtctttgaataaagtctgagtgggcggc

SEQ ID NO: 410 - DNA, 303 bp, Artificial Sequence
  Synthetic: Tandem.Pep.P53.P1.E6W ORF
atggagaccttcgagcactggtgggcgcaactgaccagcggcagcggcgtgaagcagaccctgaacttcgatctgctgaagttagccggcgacgtggagtcaaaccccggccccgagaccttcgagcactggtgggcccagctgacctctggcagcggcgtcaagcaaaccctgaacttcgaccttctgaagctggccggcgatgtggagagcaaccccggccccgagaccttcgagcactggtgggcccagctcacctcgggcaagcccatccccaaccccctgctgggtctggacagcacc

SEQ ID NO: 411 - DNA, 514 bp, Artificial Sequence
  Synthetic: TandemPep.p53.P1E6W_DNA2.0(5UTR, ORF, 3UTR)
tcaagcttttggaccctcgtacagaagctaatacgactcactatagggaaataagagagaaaagaagagtaagaagaaatataagagccaccatggaaaccttcgagcattggtgggcacagctgaccagcggatcaggagtgaaacagactctcaacttcgatctgctgaagcttgccggggacgtggagtccaaccctggccctgaaactttcgaacattggtgggctcagctcacctccggctcgggagtcaagcagactctgaacttcgacctcctgaagttggccggcgatgtggagagcaaccccggtcccgaaacctttgagcactggtgggcgcaactgacctccggaaagccgatcccaaatccgctgctggggctggacagcacctgataataggctggagcctcggtggccatgcttcttgccccttgggcctccccccagcccctcctccccttcctgcacccgtacccccgtggtctttgaataaagtctgagtgggcggc

SEQ ID NO: 412 - DNA, 303 bp, Artificial Sequence
  Synthetic: TandemPep.p53.P1E6W_DNA2.0 ORF
atggaaaccttcgagcattggtgggcacagctgaccagcggatcaggagtgaaacagactctcaacttcgatctgctgaagcttgccggggacgtggagtccaaccctggccctgaaactttcgaacattggtgggctcagctcacctccggctcgggagtcaagcagactctgaacttcgacctcctgaagttggccggcgatgtggagagcaaccccggtcccgaaacctttgagcactggtgggcgcaactgacctccggaaagccgatcccaaatccgctgctggggctggacagcacc

SEQ ID NO: 413 - DNA, 514 bp, Artificial Sequence
  Synthetic: TandemPep.P53.P6W(5UTR, ORF, 3UTR)
tcaagcttttggaccctcgtacagaagctaatacgactcactatagggaaataagagagaaaagaagagtaagaagaaatataagagccaccatgctgacctttgagcactggtgggcccagctgaccagcggcagcggcgtgaaacagaccctgaacttcgacctgctgaaactggccggcgacgtggagtctaaccccgggcccctgaccttcgagcactggtgggcccagctgaccagcggaagcggagtgaagcagacgctaaacttcgacctcctgaagctggccggcgatgtggagagcaaccccggacccctgaccttcgagcactggtgggcccagctgactagcggcaagcccatccccaatcccctgctgggcctggacagcacctgataataggctggagcctcggtggccatgcttcttgccccttgggcctccccccagcccctcctccccttcctgcacccgtacccccgtggtctttgaataaagtctgagtgggcggc

SEQ ID NO: 414 - DNA, 303 bp, Artificial Sequence
  Synthetic: TandemPep.P53.P6W ORF
atgctgacctttgagcactggtgggcccagctgaccagcggcagcggcgtgaaacagaccctgaacttcgacctgctgaaactggccggcgacgtggagtctaaccccgggcccctgaccttcgagcactggtgggcccagctgaccagcggaagcggagtgaagcagacgctaaacttcgacctcctgaagctggccggcgatgtggagagcaaccccggacccctgaccttcgagcactggtgggcccagctgactagcggcaagcccatccccaatcccctgctgggcctggacagcacc

SEQ ID NO: 415 - DNA, 514 bp, Artificial Sequence
  Synthetic: TandemPep.p53.P6W_DNA2.0(5UTR, ORF, 3UTR)
tcaagcttttggaccctcgtacagaagctaatacgactcactatagggaaataagagagaaaagaagagtaagaagaaatataagagccaccatgctcaccttcgaacactggtgggcgcagctgacctcaggctccggagtgaagcagaccctgaacttcgatctgctcaagctggctggcgatgtggaaagcaacccggggcccctcactttcgagcattggtgggcccagttgacttcgggctccggtgtcaagcaaaccctcaatttcgaccttctgaagctggccggggacgtggagagcaacccaggacctctgacctttgaacattggtgggcacagctgacttccggaaaacccatcccgaaccctctgctgggactggacagcacctgataataggctggagcctcggtggccatgcttcttgccccttgggcctccccccagcccctcctccccttcctgcacccgtacccccgtggtctttgaataaagtctgagtgggcggc

SEQ ID NO: 416 - DNA, 303 bp, Artificial Sequence
  Synthetic: TandemPep.p53.P6W_DNA2.0 ORF
atgctcaccttcgaacactggtgggcgcagctgacctcaggctccggagtgaagcagaccctgaacttcgatctgctcaagctggctggcgatgtggaaagcaacccggggcccctcactttcgagcattggtgggcccagttgacttcgggctccggtgtcaagcaaaccctcaatttcgaccttctgaagctggccggggacgtggagagcaacccaggacctctgacctttgaacattggtgggcacagctgacttccggaaaacccatcccgaaccctctgctgggactggacagcacc

SEQ ID NO: 417 - DNA, 514 bp, Artificial Sequence
  Synthetic: TandemPep.p53.pDIQ(5UTR, ORF, 3UTR)
tcaagcttttggaccctcgtacagaagctaatacgactcactatagggaaataagagagaaaagaagagtaagaagaaatataagagccaccatggagaccttcgagcactggtggagccagctgcttagcggaagcggagtgaaacaaaccttaaacttcgacctgctgaagctggccggcgacgtggaaagcaatcccggccccgagaccttcgagcactggtggagccagctgttgagcggtagcggcgtgaagcagaccctgaacttcgacctgctcaagctggccggcgacgtggagagcaaccccggcccagagaccttcgagcactggtggagccagctgctgagcggcaagcccatccccaatcccctgctgggcctggacagcacctgataataggctggagcctcggtggccatgcttcttgccccttgggcctccccccagcccctcctccccttcctgcacccgtacccccgtggtctttgaataaagtctgagtgggcggc

SEQ ID NO: 418 - DNA, 303 bp, Artificial Sequence
  Synthetic: TandemPep.p53.pDIQ ORF
atggagaccttcgagcactggtggagccagctgcttagcggaagcggagtgaaacaaaccttaaacttcgacctgctgaagctggccggcgacgtggaaagcaatcccggccccgagaccttcgagcactggtggagccagctgttgagcggtagcggcgtgaagcagaccctgaacttcgacctgctcaagctggccggcgacgtggagagcaaccccggcccagagaccttcgagcactggtggagccagctgctgagcggcaagcccatccccaatcccctgctgggcctggacagcacc

SEQ ID NO: 419 - DNA, 514 bp, Artificial Sequence
  Synthetic: TandemPep.p53.pDIQ_DNA2.0(5UTR, ORF, 3UTR)
tcaagcttttggaccctcgtacagaagctaatacgactcactatagggaaataagagagaaaagaagagtaagaagaaatataagagccaccatggaaacctttgaacactggtggagccagctcctgtcgggatccggcgtgaagcaaactctgaatttcgacctgttgaaacttgcgggggacgtcgagagcaacccgggtcctgaaactttcgagcattggtggtcccagctgctgtcaggctccggagtgaagcagaccctcaacttcgatctgctgaagctggccggcgatgtggagtccaacccgggacccgaaaccttcgagcactggtggtcgcagctgctctccgggaagccaatccccaaccctctgctcggactggacagcacctgataataggctggagcctcggtggccatgcttcttgccccttgggcctccccccagcccctcctccccttcctgcacccgtacccccgtggtctttgaataaagtctgagtgggcggc

SEQ ID NO: 420 - DNA, 303 bp, Artificial Sequence
  Synthetic: NVL(eh)_TandemPep.p53.pDIQ_DNA2.0 ORF
atggaaacctttgaacactggtggagccagctcctgtcgggatccggcgtgaagcaaactctgaatttcgacctgttgaaacttgcgggggacgtcgagagcaacccgggtcctgaaactttcgagcattggtggtcccagctgctgtcaggctccggagtgaagcagaccctcaacttcgatctgctgaagctggccggcgatgtggagtccaacccgggacccgaaaccttcgagcactggtggtcgcagctgctctccgggaagccaatccccaaccctctgctcggactggacagcacc

SEQ ID NO: 421 - DNA, 514 bp, Artificial Sequence
  Synthetic: TandemPep.p53.pMI(5UTR, ORF, 3UTR)
tcaagcttttggaccctcgtacagaagctaatacgactcactatagggaaataagagagaaaagaagagtaagaagaaatataagagccaccatgacctccttcgccgagtactggaacctgctgagccctggcagcggcgttaaacagaccctgaatttcgacctgctgaagctggccggcgatgtggagagcaaccccggccccaccagcttcgctgaatactggaacttgctgagccccggctcaggcgtgaagcagaccctgaacttcgacttactgaaactggccggcgacgtggaaagcaatcccggccccaccagcttcgcagagtactggaacctgctgagccccggcaagcccatccccaaccccctgctcggcctggacagcacctgataataggctggagcctcggtggccatgcttcttgccccttgggcctccccccagcccctcctccccttcctgcacccgtacccccgtggtctttgaataaagtctgagtgggcggc

SEQ ID NO: 422 - DNA, 303 bp, Artificial Sequence
  Synthetic: TandemPep.p53.pMI ORF
atgacctccttcgccgagtactggaacctgctgagccctggcagcggcgttaaacagaccctgaatttcgacctgctgaagctggccggcgatgtggagagcaaccccggccccaccagcttcgctgaatactggaacttgctgagccccggctcaggcgtgaagcagaccctgaacttcgacttactgaaactggccggcgacgtggaaagcaatcccggccccaccagcttcgcagagtactggaacctgctgagccccggcaagcccatccccaaccccctgctcggcctggacagcacc

SEQ ID NO: 423 - DNA, 514 bp, Artificial Sequence
  Synthetic: TandemPep.p53.pMI_DNA2.0(5UTR, ORF, 3UTR)
tcaagcttttggaccctcgtacagaagctaatacgactcactatagggaaataagagagaaaagaagagtaagaagaaatataagagccaccatgaccagcttcgccgaatactggaacctcttgtcccccggatcgggggtcaagcagaccctgaactttgatctcctgaagctggccggggatgtggaaagcaaccccggacctacttccttcgccgagtactggaatctgctgtcgccgggatccggcgtgaagcaaactctgaacttcgacctccttaaacttgcgggcgacgtggagtccaacccgggccctacctcattcgctgaatattggaacctcctgtccccgggaaagcccatccctaacccactgctgggtctggacagcacctgataataggctggagcctcggtggccatgcttcttgccccttgggcctccccccagcccctcctccccttcctgcacccgtacccccgtggtctttgaataaagtctgagtgggcggc

SEQ ID NO: 424 - DNA, 303 bp, Artificial Sequence
  Synthetic: (TandemPep.p53.pMI_DNA2.0 ORF
atgaccagcttcgccgaatactggaacctcttgtcccccggatcgggggtcaagcagaccctgaactttgatctcctgaagctggccggggatgtggaaagcaaccccggacctacttccttcgccgagtactggaatctgctgtcgccgggatccggcgtgaagcaaactctgaacttcgacctccttaaacttgcgggcgacgtggagtccaacccgggccctacctcattcgctgaatattggaacctcctgtccccgggaaagcccatccctaacccactgctgggtctggacagcacc

SEQ ID NO: 425 - protein, 83 aa, Artificial Sequence
  Synthetic: TandemPep.PP2aB56alpha, ORF
MTPDYFLGSGVKQTLNFDLLKLAGDVESNPGPTPDYFLGSGVKQTLNFDLLKLAGDVESNPGPTPDYFLGKPIPNPLLGLDST

SEQ ID NO: 426 - protein, 136 aa, Artificial Sequence
  Synthetic: TandemPep.PP2aDP7, ORF
MVKKKKIKREIKIFRGRSRFRGRSRGSGVKQTLNFDLLLAGDVESNPGPVKKKKIKREIKIFRGRSRFRGRSRGSGVKQTLNFDLLKLAGDVESNPGPVKKKKIKREIKIFRGRSRFRGRSRGKPIPNPLLGLDST

SEQ ID NO: 427 - protein, 118 aa, Artificial Sequence
  Synthetic: TandemPep.PP2aDPT2
RQKRLIRQKRLIRQKRLIGSGVKQTLNFDLLKLAGDVESNPGPRQKRLIRQKRLIRQKRLIGSGVKQTLNFDLLKLAGDVESNPGPRQKRLIRQKRLIRQKRLIGKPIPNPLLGLDST

SEQ ID NO: 428 - protein, 146 aa, Artificial Sequence
  Synthetic: TandemPep.PP2aDPT5
MVKKKKIKREIKIPRRPGPTRKHYQPYAGSGVKQTLNFDLLKLAGDVESNPGPVKKKKIKREIKIPRRPGPTRKHYQPYAGSGVKQTLNFDLLKLAGDVESNPGPVKKKKIKREIKIPRRPGPTRKHYQPYAGKPIPNPLLGLDST

SEQ ID NO: 429 - protein, 6 aa, Artificial Sequence
  Synthetic: PP2aB56alpha
TPDYFL

SEQ ID NO: 430 - protein, 24 aa, Artificial Sequence
  Synthetic: PP2aDP7
VKKKKIKREIKIFRGRSRFRGRSR

SEQ ID NO: 431 - protein, 18 aa, Artificial Sequence
  Synthetic: PP2aDPT2
RQKRLIRQKRLIRQKRLI

SEQ ID NO: 432 - protein, 27 aa, Artificial Sequence
  Synthetic: PP2aDPT5
VKKKKIKREIKIPRRPGPTRKHYQPYA

SEQ ID NO: 433 - DNA, 460 bp, Artificial Sequence
  Synthetic: TandemPep.PP2aB56alpha (5 UTR, ORF, 3 UTR)
tcaagcttttggaccctcgtacagaagctaatacgactcactatagggaaataagagagaaaagaagagtaagaagaaatataagagccaccatgacccccgactacttcctgggcagcggcgttaagcagaccctgaactttgacctactgaagctggccggcgatgtggagtctaaccccggccccacccccgactacttcctgggctccggcgtgaagcagaccctgaatttcgacctgctaaagctggccggcgacgtggagagcaaccccggccccacccccgactactttctgggcaagcccatccccaaccccctgctgggcctggacagcacctgataataggctggagcctcggtggccatgcttcttgccccttgggcctccccccagcccctcctccccttcctgcacccgtacccccgtggtctttgaataaagtctgagtgggcggc

SEQ ID NO: 434 - DNA, 249 bp, Artificial Sequence
  Synthetic: TandemPep.PP2aB56alph ORF
atgacccccgactacttcctgggcagcggcgttaagcagaccctgaactttgacctactgaagctggccggcgatgtggagtctaaccccggccccacccccgactacttcctgggctccggcgtgaagcagaccctgaatttcgacctgctaaagctggccggcgacgtggagagcaaccccggccccacccccgactactttctgggcaagcccatccccaaccccctgctgggcctggacagcacc

SEQ ID NO: 435 - DNA, 622 bp, Artificial Sequence
  Synthetic: TandemPep.PP2aDP7 (5 UTR, ORF, 3 UTR)
tcaagcttttggaccctcgtacagaagctaatacgactcactatagggaaataagagagaaaagaagagtaagaagaaatataagagccaccatggtgaagaagaagaagatcaagcgggagatcaagatcttcagaggaagaagccggttcagagggagaagcagaggcagcggcgtgaagcagacgctgaattttgacctgttgaagctggcaggagacgtggagtccaaccccggtcccgtgaagaagaagaaaatcaaaagagaaatcaagatcttcagaggcagaagcagattcagaggcagaagcagaggcagcggcgtgaaacaaaccctaaacttcgacctgctgaagctcgccggcgacgtggagagcaacccaggccccgtgaagaagaagaagattaagagagagatcaagatcttcagaggccgcagcagattcagaggcagatctcgtggcaagcccatcccaaaccccctgctggggctcgacagcacctgataataggctggagcctcggtggccatgcttcttgccccttgggcctccccccagcccctcctccccttcctgcacccgtacccccgtggtctttgaataaagtctgagtgggcggc

SEQ ID NO: 436 - DNA, 411 bp, Artificial Sequence
  Synthetic: TandemPep.PP2aDP7ORF
atggtgaagaagaagaagatcaagcgggagatcaagatcttcagaggaagaagccggttcagagggagaagcagaggcagcggcgtgaagcagacgctgaattttgacctgttgaagctggcaggagacgtggagtccaaccccggtcccgtgaagaagaagaaaatcaaaagagaaatcaagatcttcagaggcagaagcagattcagaggcagaagcagaggcagcggcgtgaaacaaaccctaaacttcgacctgctgaagctcgccggcgacgtggagagcaacccaggccccgtgaagaagaagaagattaagagagagatcaagatcttcagaggccgcagcagattcagaggcagatctcgtggcaagcccatcccaaaccccctgctggggctcgacagcacc

SEQ ID NO: 437 - DNA, 568 bp, Artificial Sequence
  Synthetic: TandemPep.PP2aDPT2(5 UTR, ORF, 3 UTR)
tcaagcttttggaccctcgtacagaagctaatacgactcactatagggaaataagagagaaaagaagagtaagaagaaatataagagccaccatgagacagaaaagactgattagacagaagagactgatcagacagaagagactgatcgggagcggcgttaagcagaccttaaacttcgatctgctgaaactggccggcgacgtggagagtaaccccgggcccagacagaaaagactcatcaggcagaagagactgatcagacagaagagactgatcggctccggcgtgaaacagaccctgaatttcgacctgctgaagctggccggagatgtcgagagcaaccccggccccagacagaagagactgataagacaaaagagattgatcagacagaagagactgatcggcaagcccatccccaaccccctgctgggcctggacagcacctgataataggctggagcctcggtggccatgcttcttgccccttgggcctccccccagcccctcctccccttcctgcacccgtacccccgtggtctttgaataaagtctgagtgggcggc

SEQ ID NO: 438 - DNA, 357 bp, Artificial Sequence
  Synthetic: TandemPep.PP2aDPT2 ORF
atgagacagaaaagactgattagacagaagagactgatcagacagaagagactgatcgggagcggcgttaagcagaccttaaacttcgatctgctgaaactggccggcgacgtggagagtaaccccgggcccagacagaaaagactcatcaggcagaagagactgatcagacagaagagactgatcggctccggcgtgaaacagaccctgaatttcgacctgctgaagctggccggagatgtcgagagcaaccccggccccagacagaagagactgataagacaaaagagattgatcagacagaagagactgatcggcaagcccatccccaaccccctgctgggcctggacagcacc

SEQ ID NO: 439 - DNA, 649 bp, Artificial Sequence
  Synthetic: TandemPep.PP2aDPT5(5 UTR, ORF, 3 UTR)
tcaagcttttggaccctcgtacagaagctaatacgactcactatagggaaataagagagaaaagaagagtaagaagaaatataagagccaccatggtcaaaaagaagaagatcaaaagagagatcaagatccccagaagacccgggccaacaaggaaacactaccagccctacgccggcagcggggtgaaacagaccctgaacttcgatctgctgaagttggccggggacgtcgagtccaatcccggccccgtgaagaagaaaaagatcaagagggagatcaagatccccagaagacccggtcccacccggaagcactaccagccctacgcgggctccggcgtgaagcagaccctgaatttcgacctgctgaaactggccggtgacgtggagagcaaccctggccccgtgaagaagaagaagattaagagagagatcaagatccccagaagacccggccccaccagaaagcactaccaaccctatgccggcaagcccatcccaaaccccctgctgggactggacagcacctgataataggctggagcctcggtggccatgcttcttgccccttgggcctccccccagcccctcctccccttcctgcacccgtacccccgtggtctttgaataaagtctgagtgggcggc

SEQ ID NO: 440 - DNA, 438 bp, Artificial Sequence
  Synthetic: TandemPep.PP2aDPT5 ORF
atggtcaaaaagaagaagatcaaaagagagatcaagatccccagaagacccgggccaacaaggaaacactaccagccctacgccggcagcggggtgaaacagaccctgaacttcgatctgctgaagttggccggggacgtcgagtccaatcccggccccgtgaagaagaaaaagatcaagagggagatcaagatccccagaagacccggtcccacccggaagcactaccagccctacgcgggctccggcgtgaagcagaccctgaatttcgacctgctgaaactggccggtgacgtggagagcaaccctggccccgtgaagaagaagaagattaagagagagatcaagatccccagaagacccggccccaccagaaagcactaccaaccctatgccggcaagcccatcccaaaccccctgctgggactggacagcacc

SEQ ID NO: 441 - DNA, 649 bp, Artificial Sequence
  Synthetic: TandemPep.PP2aDPT5_codon optimized(5 UTR, ORF, 3 UTR)
tcaagcttttggaccctcgtacagaagctaatacgactcactatagggaaataagagagaaaagaagagtaagaagaaatataagagccaccatggtcaagaagaagaagatcaagcgggagattaagattcctagacgccccggacccactagaaagcattaccagccttacgcgggctccggagtgaagcaaaccctgaacttcgacttgctgaagctggccggggacgtggagtccaaccccggcccggtcaagaaaaagaagattaagcgcgaaatcaaaatcccccgccggccggggcctacccggaagcactaccagccatacgcaggaagcggcgtgaagcagactctgaatttcgatctcctgaagctcgccggagatgtggaatcgaacccaggtcccgtgaagaagaaaaagatcaagagggagatcaagatcccgaggcggccgggtcccacccgcaagcactatcagccgtacgctggaaagcctatccctaacccgcttctgggcctggactcaacctgataataggctggagcctcggtggccatgcttcttgccccttgggcctccccccagcccctcctccccttcctgcacccgtacccccgtggtctttgaataaagtctgagtgggcggc

SEQ ID NO: 442 - DNA, 438 bp, Artificial Sequence
  Synthetic: TandemPep.PP2aDPT5_codon optimized ORF
atggtcaagaagaagaagatcaagcgggagattaagattcctagacgccccggacccactagaaagcattaccagccttacgcgggctccggagtgaagcaaaccctgaacttcgacttgctgaagctggccggggacgtggagtccaaccccggcccggtcaagaaaaagaagattaagcgcgaaatcaaaatcccccgccggccggggcctacccggaagcactaccagccatacgcaggaagcggcgtgaagcagactctgaatttcgatctcctgaagctcgccggagatgtggaatcgaacccaggtcccgtgaagaagaaaaagatcaagagggagatcaagatcccgaggcggccgggtcccacccgcaagcactatcagccgtacgctggaaagcctatccctaacccgcttctgggcctggactcaacc

SEQ ID NO: 443 - protein, 125 aa, Artificial Sequence
  Synthetic: TandemPep.STAT3.DBD ORF
MPLTAVFWLIYVLAKALVTVCGSGVKQTLNFDLLKLAGDVESNPGPPLTAVFWLIYVLAKALVTVCGSGVKQTLNFDLLKLAGDVESNPGPPLTAVFWLIYVLAKALVTVCGKPIPNPLLGLDST

SEQ ID NO: 444 - protein, 20 aa, Artificial Sequence
  Synthetic: STAT3
PLTAVFWLIYVLAKALVTVC

SEQ ID NO: 445 - DNA, 375 bp, Artificial Sequence
  Synthetic: TandemPep.STAT3.DBD ORF
atgcccctgaccgccgtgttctggctgatctacgtgttggctaaggccctggtgaccgtgtgcggaagcggagtgaaacagaccttgaactttgacctgctgaagctggccggagacgtggaaagcaaccccggcccccccctgaccgcagtgttttggctgatatacgtgctggccaaggccctggtgactgtgtgcggcagcggcgtgaagcagaccctgaacttcgacctgctgaagctggccggcgacgtcgagagcaaccccggcccccccctgaccgccgtgttctggttgatatatgtgctggccaaggccctggtgacagtgtgcggcaagcccatcccaaaccccctgcttggcctggatagcacc

SEQ ID NO: 446 - DNA, 586 bp, Artificial Sequence
  Synthetic: TandemPep.STAT3.DBD_codon optimized(5 UTR, ORF, 3 UTR)
tcaagcttttggaccctcgtacagaagctaatacgactcactatagggaaataagagagaaaagaagagtaagaagaaatataagagccaccatgcctctgacggcagtgttctggttgatctacgtgctcgccaaagcccttgtgaccgtgtgtggatccggcgtcaagcagaccctcaatttcgacttgctgaagctggccggggatgtggaaagcaaccccggacccccactgaccgccgtgttttggctcatctacgtcctggctaaggcgctcgtgactgtgtgcggttcgggcgtgaagcagactctgaacttcgatctgctcaagcttgccggggacgtggagtccaaccctggacctccgctgaccgcggtgttctggctgatctatgtgctggccaaggccctggtcaccgtctgcggaaagccgattcccaacccgctgctgggcctggacagcacctgataataggctggagcctcggtggccatgcttcttgccccttgggcctccccccagcccctcctccccttcctgcacccgtacccccgtggtctttgaataaagtctgagtgggcggc

SEQ ID NO: 447 - DNA, 375 bp, Artificial Sequence
  Synthetic: TandemPep.STAT3.DBD_codon optimized ORF
atgcctctgacggcagtgttctggttgatctacgtgctcgccaaagcccttgtgaccgtgtgtggatccggcgtcaagcagaccctcaatttcgacttgctgaagctggccggggatgtggaaagcaaccccggacccccactgaccgccgtgttttggctcatctacgtcctggctaaggcgctcgtgactgtgtgcggttcgggcgtgaagcagactctgaacttcgatctgctcaagcttgccggggacgtggagtccaaccctggacctccgctgaccgcggtgttctggctgatctatgtgctggccaaggccctggtcaccgtctgcggaaagccgattcccaacccgctgctgggcctggacagcacc

SEQ ID NO: 448 - protein, 48 aa, Artificial Sequence
  Synthetic: Super TDU
SVDDHFAKSLGDTWLQIGGSGNPKTANVPQTVPMRLRKLPDSFFKPPE

SEQ ID NO: 449 - protein, 48 aa, Artificial Sequence
  Synthetic: Super TDU(MF2A)
SVDDHFAKSLGDTWLQIGGSGNPKTANVPQTVPARLRKLPDSAFKPPE

SEQ ID NO: 450 - protein, 48 aa, Artificial Sequence
  Synthetic: Super TDU(HFMF4A)
SVDDAAAKSLGDTWLQIGGSGNPKTANVPQTVPARLRKLPDSAFKPPE

SEQ ID NO: 451 - protein, 52 aa, Homo sapiens
  misc_feature (1)..(52): Human VGLL4-TDU 1 and 2
DPVVEEHFRRSLGKNYKEPEPAPNSVSITGSVDDHFAKALGDTWLQIKAAKD

SEQ ID NO: 452 - protein, 258 aa, Homo sapiens
  misc_feature (1)..(258): Human VGLL4
QTLPVASALSSHRTGPPPISPSKRKFSMEPGDEDLDCDNDHVSKMSRIFNPHLNKTANGDCRRDPRERSRSPIERAVAPTMSLHGSHLYTSLPSLGLEQPLALTKNSLDASRPAGLSPTLTPGERQQNRPSVITCASAGARNCNLSHCPIAHSGCAAPGPASYRRPPSAATTCDPVVEEHFRRSLGKNYKEPEPAPNSVSITGSVDDHFAKALGDTWLQIKAAKDGASSSPESASRRGQPASPSAHMVSHSHSPSVVS

SEQ ID NO: 453 - protein, 259 aa, Homo sapiens
  misc_feature (1)..(259): Human VGLL4(complete)
MQTLPVASALSSHRTGPPPISPSKRKFSMEPGDEDLDCDNDHVSKMSRIFNPHLNKTANGDCRRDPRERSRSPIERAVAPTMSLHGSHLYTSLPSLGLEQPLALTKNSLDASRPAGLSPTLTPGERQQNRPSVITCASAGARNCNLSHCPIAHSGCAAPGPASYRRPPSAATTCDPVVEEHFRRSLGKNYKEPEPAPNSVSITGSVDDHFAKALGDTWLQIKAAKDGASSSPESASRRGQPASPSAHMVSHSHSPSVVS

SEQ ID NO: 454 - protein, 258 aa, Homo sapiens
  misc_feature (1)..(258): Human VGLL4(HF4A)
QTLPVASALSSHRTGPPPISPSKRKFSMEPGDEDLDCDNDHVSKMSRIFNPHLNKTANGDCRRDPRERSRSPIERAVAPTMSLHGSHLYTSLPSLGLEQPLALTKNSLDASRPAGLSPTLTPGERQQNRPSVITCASAGARNCNLSHCPIAHSGCAAPGPASYRRPPSAATTCDPVVEEAARRSLGKNYKEPEPAPNSVSITGSVDDAAAKALGDTWLQIKAAKDGASSSPESASRRGQPASPSAHMVSHSHSPSVVS

SEQ ID NO: 455 - protein, 259 aa, Homo sapiens
  misc_feature (1)..(259): Human VGLL4(HF4A)(complete)
MQTLPVASALSSHRTGPPPISPSKRKFSMEPGDEDLDCDNDHVSKMSRIFNPHLNKTANGDCRRDPRERSRSPIERAVAPTMSLHGSHLYTSLPSLGLEQPLALTKNSLDASRPAGLSPTLTPGERQQNRPSVITCASAGARNCNLSHCPIAHSGCAAPGPASYRRPPSAATTCDPVVEEAARRSLGKNYKEPEPAPNSVSITGSVDDAAAKALGDTWLQIKAAKDGASSSPESASRRGQPASPSAHMVSHSHSPSVVS

SEQ ID NO: 456 - protein, 17 aa, Artificial Sequence
  Synthetic: VGLL4 TDU 1(V1)
DPVVEEHFRRSLGKNYK

SEQ ID NO: 457 - protein, 18 aa, Artificial Sequence
  Synthetic: VGLL4 TDU 1(V2)
DPVVEEHFRRSLGKNYKE

SEQ ID NO: 458 - protein, 20 aa, Artificial Sequence
  Synthetic: VGLL4 TDU 1(V3)
DPVVEEHFRRSLGKNYKEPE

SEQ ID NO: 459 - protein, 24 aa, Artificial Sequence
  Synthetic: VGLL4 TDU 2(V1)
SVSITGSVDDHFAKALGDTWLQIK

SEQ ID NO: 460 - protein, 25 aa, Artificial Sequence
  Synthetic: VGLL4 TDU 2(V2)
SVSITGSVDDHFAKALGDTWLQIKA

SEQ ID NO: 461 - protein, 28 aa, Artificial Sequence
  Synthetic: VGLL4 TDU 2(V3)
SVSITGSVDDHFAKALGDTWLQIKAAKD

SEQ ID NO: 462 - protein, 17 aa, Artificial Sequence
  Synthetic: VGL44 Super TDU
SVDDHFAKSLGDTWLQI

SEQ ID NO: 463 - protein, 109 aa, Artificial Sequence
  Synthetic: Super TDU(NLS).cV5 ORF
SVDDHFAKSLGDTWLQIGGSGNPKTANVPQTVPMRLRKLPDSFFKPPEMTYPRRRFRRRRHRPRSHLGQILRRRPWLVHPRHRYRWRRKNGIFNTGKPIPNPLLGLDST

SEQ ID NO: 464 - protein, 88 aa, Artificial Sequence
  Synthetic: Super TDU(sv40NLS).cV5 ORF
SVDDHFAKSLGDTWLQIGGSGNPKTANVPQTVPMRLRKLPDSFFKPPEPKKKRKVPKKKRKVPKKKRKVGIFNTGKPIPNPLLGLDST

SEQ ID NO: 465 - protein, 109 aa, Artificial Sequence
  Synthetic: MF2A(NLS).cV5 ORF
SVDDHFAKSLGDTWLQIGGSGNPKTANVPQTVPARLRKLPDSAFKPPEMTYPRRRFRRRRHRPRSHLGQILRRRPWLVHPRHRYRWRRKNGIFNTGKPIPNPLLGLDST

SEQ ID NO: 466 - protein, 82 aa, Artificial Sequence
  Synthetic: MF2A(sv40NLS).cV5 ORF
VDDHFAKSLGDTWLQIGGSGNPKTANVPQTVPARLRKLPDSAFKPPEPKKKRKVPKKKRKVPKKKRKVGKPIPNPLLGLDST

SEQ ID NO: 467 - protein, 109 aa, Artificial Sequence
  Synthetic: HFMF4A(NLS).cV5 ORF
SVDDAAAKSLGDTWLQIGGSGNPKTANVPQTVPARLRKLPDSAFKPPEMTYPRRRFRRRRHRPRSHLGQILRRRPWLVHPRHRYRWRRKNGIFNTGKPIPNPLLGLDST

SEQ ID NO: 468 - protein, 83 aa, Artificial Sequence
  Synthetic: HFMF4A(sv40NLS).cV5
SVDDAAAKSLGDTWLQIGGSGNPKTANVPQTVPARLRKLPDSAFKPPEPKKKRKVPKKKRKVPKKKRKVGKPIPNPLLGLDST

SEQ ID NO: 469 - protein, 119 aa, Artificial Sequence
  Synthetic: huVGLL4-TDU1.2(NLS).cV5 ORF
STMGDPVVEEHFRRSLGKNYKEPEPAPNSVSITGSVDDHFAKALGDTWLQIKAAKDSAMTYPRRRFRRRRHRPRSHLGQILRRRPWLVHPRHRYRWRRKNGIFNTGKPIPNPLLGLDST

SEQ ID NO: 470 - protein, 93 aa, Artificial Sequence
  Synthetic: huVGLL4-TDU1.2(sv40NLS).cV5
STMGDPVVEEHFRRSLGKNYKEPEPAPNSVSITGSVDDHFAKALGDTWLQIKAAKDSAPKKKRKVPKKKRKVPKKKRKVGKPIPNPLLGLDST

SEQ ID NO: 471 - protein, 304 aa, Artificial Sequence
  Synthetic: huVGLL4.cV5 ORF
METPLDVLSRAASLVHADDEKREAALRGEPRIQTLPVASALSSHRTGPPPISPSKRKFSMEPGDEDLDCDNDHVSKMSRIFNPHLNKTANGDCRRDPRERSRSPIERAVAPTMSLHGSHLYTSLPSLGLEQPLALTKNSLDASRPAGLSPTLTPGERQQNRPSVITCASAGARNCNLSHCPIAHSGCAAPGPASYRRPPSAATTCDPVVEEHFRRSLGKNYKEPEPAPNSVSITGSVDDHFAKALGDTWLQIKAAKDGASSSPESASRRGQPASPSAHMVSHSHSPSVVSGKPIPNPLLGLDST

SEQ ID NO: 472 - protein, 304 aa, Artificial Sequence
  Synthetic: huVGLL4(HF4A).cV5 ORF
METPLDVLSRAASLVHADDEKREAALRGEPRIQTLPVASALSSHRTGPPPISPSKRKFSMEPGDEDLDCDNDHVSKMSRIFNPHLNKTANGDCRRDPRERSRSPIERAVAPTMSLHGSHLYTSLPSLGLEQPLALTKNSLDASRPAGLSPTLTPGERQQNRPSVITCASAGARNCNLSHCPIAHSGCAAPGPASYRRPPSAATTCDPVVEEAARRSLGKNYKEPEPAPNSVSITGSVDDAAAKALGDTWLQIKAAKDGASSSPESASRRGQPASPSAHMVSHSHSPSVVSGKPIPNPLLGLDST

SEQ ID NO: 473 - protein, 150 aa, Artificial Sequence
  Synthetic: SQT.(nt)VGLL4-TDU1.(sv40NLS).cV5 ORF
MIPRDPVVEEHFRRSLGKNYKEGLSEAKPATPEIQEIVDKVKPQLEEKTNETYGKLEAVQYKTQVLASTNYYIKVRAGDNKYMHLKVFNGPPGQNADRVLTGYQVDKNKDDELTGFPKKKRKVPKKKKVPKKKRKVGKPIPNPLLGLDST

SEQ ID NO: 474 - protein, 149 aa, Artificial Sequence
  Synthetic: SQT.(L1)VGLL4-TDU1.(sv40NLS).cV5 ORF
MIPRGLSEAKPATPEIQEIVDKVKPQLEEKTNETYGKLEAVQYKTQVLDPVVEEHFRRSLGKNYKASTNYYIKVRAGDNKYMHLKVFNGPPGQNADRVLTGYQVDKNKDDELTGFPKKKRKVPKKKRVPKKKRKVGKPIPNPLLGLDST

SEQ ID NO: 475 - protein, 149 aa, Artificial Sequence
  Synthetic: SQT.(L2)VGLL4-TDU1.(sv40NLS).cV5 ORF
MIPRGLSEAKPATPEIQEIVDKVKPQLEEKTNETYGKLEAVQYKTQVLASTNYYIKVRAGDNKYMHLKVFNGPDPVVEEHFRRSLGKNYKPGQNADRVLTGYQVDKNKDDELTGFPKKKRKVPKKKRVPKKKRKVGKPIPNPLLGLDST

SEQ ID NO: 476 - protein, 156 aa, Artificial Sequence
  Synthetic: SQT.(nt)VGLL4-TDU2.(sv40NLS).cV5 ORF
MIPRSVSITGSVDDHFAKALGDTWLQIKGLSEAKPATPEIQEIVDKVKPQLEEKTNETYGKLEAVQYKTQVLASTNYYIKVRAGDNKYMHLKVFNGPPGQNADRVLTGYQVDKNKDDELTGFPKKKRVPKKKRKVPKKKRKVGKPIPNPLLGLDST

SEQ ID NO: 477 - protein, 156 aa, Artificial Sequence
  Synthetic: SQT.(L1)VGLL4-TDU2.(sv40NLS).cV5 ORF
MIPRGLSEAKPATPEIQEIVDKVKPQLEEKTNETYGKLEAVQYKTQVLSVSITGSVDDHFAKALGDTWLQIKASTNYYIKVRAGDNKYMHLKVFNGPPGQNADRVLTGYQVDKNKDDELTGFPKKKRVPKKKRKVPKKKRKVGKPIPNPLLGLDST

SEQ ID NO: 478 - protein, 156 aa, Artificial Sequence
  Synthetic: SQT.(L2)VGLL4-TDU2.(sv40NLS).cV5 ORF
MIPRGLSEAKPATPEIQEIVDKVKPQLEEKTNETYGKLEAVQYKTQVLASTNYYIKVRAGDNKYMHLKVFNGPSVSITGSVDDHFAKALGDTWLQIKPGQNADRVLTGYQVDKNKDDELTGFPKKKRVPKKKRKVPKKKRKVGKPIPNPLLGLDST

SEQ ID NO: 479 - protein, 85 aa, Artificial Sequence
  Synthetic: huVGLL4-TDU1(NLS).cV5 ORF
STMGDPVVEEHFRRSLGKNYKEPEMTYPRRRFRRRRHRPRSHLGQILRRRPWLVHPRHRYRWRRKNGIFNTGKPIPNPLLGLDST

SEQ ID NO: 480 - protein, 94 aa, Artificial Sequence
  Synthetic: huVGLL4-TDU2(NLS).cV5 ORF
STMSVSITGSVDDHFAKALGDTWLQIKAAKDSAMTYPRRRFRRRRHRPRSHLGQILRRRPWLVHPRHRYRWRRKNGIFNTGKPIPNPLLGLDST

SEQ ID NO: 481 - protein, 95 aa, Artificial Sequence
  Synthetic: Super TDU(NLS) ORF amino acid sequence without v5 tag
SVDDHFAKSLGDTWLQIGGSGNPKTANVPQTVPMRLRKLPDSFFKPPEMTYPRRRFRRRRHRPRSHLGQILRRRPWLVHPRHRYRWRRKNGIFNT

SEQ ID NO: 482 - protein, 74 aa, Artificial Sequence
  Synthetic: Super TDU(sv40NLS) ORF amino acid sequence without v5 tag
SVDDHFAKSLGDTWLQIGGSGNPKTANVPQTVPMRLRKLPDSFFKPPEPKKKRKVPKKKRKVPKKKRKVGIFNT

SEQ ID NO: 483 - protein, 95 aa, Artificial Sequence
  Synthetic: MF2A(NLS) ORF amino acid sequence without v5 tag
SVDDHFAKSLGDTWLQIGGSGNPKTANVPQTVPARLRKLPDSAFKPPEMTYPRRRFRRRRHRPRSHLGQILRRRPWLVHPRHRYRWRRKNGIFNT

SEQ ID NO: 484 - protein, 69 aa, Artificial Sequence
  Synthetic: MF2A(sv40NLS) ORF amino acid sequence without v5 tag
SVDDHFAKSLGDTWLQIGGSGNPKTANVPQTVPARLRKLPDSAFKPPEPKKKRKVPKKKRKVPKKKRKV

SEQ ID NO: 485 - protein, 95 aa, Artificial Sequence
  Synthetic: HFMF4A(NLS) ORF amino acid sequence without v5 tag
SVDDAAAKSLGDTWLQIGGSGNPKTANVPQTVPARLRKLPDSAFKPPEMTYPRRRFRRRRHRPRSHLGQILRRRPWLVHPRHRYRWRRKNGIFNT

SEQ ID NO: 486 - protein, 69 aa, Artificial Sequence
  Synthetic: HFMF4A(sv40NLS).ORF amino acid sequence without v5 tag
SVDDAAAKSLGDTWLQIGGSGNPKTANVPQTVPARLRKLPDSAFKPPEPKKKRKVPKKKRKVPKKKRKV

SEQ ID NO: 487 - protein, 105 aa, Artificial Sequence
  Synthetic: huVGLL4-TDU1.2(NLS) ORF amino acid sequence without v5 tag
STMGDPVVEEHFRRSLGKNYKEPEPAPNSVSITGSVDDHFAKALGDTWLQIKAAKDSAMTYPRRRFRRRRHRPRSHLGQILRRRPWLVHPRHRYRWRRKNGIFNT

SEQ ID NO: 488 - protein, 79 aa, Artificial Sequence
  Synthetic: huVGLL4-TDU1.2(sv40NLS) ORF amino acid sequence without v5 tag
STMGDPVVEEHFRRSLGKNYKEPEPAPNSVSITGSVDDHFAKALGDTWLQIKAAKDSAPKKKRKVPKKKRKVPKKKRKV

SEQ ID NO: 489 - protein, 290 aa, Artificial Sequence
  Synthetic: huVGLL4 ORF amino acid sequence without v5 tag
METPLDVLSRAASLVHADDEKREAALRGEPRIQTLPVASALSSHRTGPPPISPSKRKFSMEPGDEDLDCDNDHVSKMSRIFNPHLNKTANGDCRRDPRERSRSPIERAVAPTMSLHGSHLYTSLPSLGLEQPLALTKNSLDASRPAGLSPTLTPGERQQNRPSVITCASAGARNCNLSHCPIAHSGCAAPGPASYRRPPSAATTCDPVVEEHFRRSLGKNYKEPEPAPNSVSITGSVDDHFAKALGDTWLQIKAAKDGASSSPESASRRGQPASPSAHMVSHSHSPSVVS

SEQ ID NO: 490 - protein, 290 aa, Artificial Sequence
  Synthetic: huVGLL4(HF4A) ORF amino acid sequence without v5 tag
METPLDVLSRAASLVHADDEKREAALRGEPRIQTLPVASALSSHRTGPPPISPSKRKFSMEPGDEDLDCDNDHVSKMSRIFNPHLNKTANGDCRRDPRERSRSPIERAVAPTMSLHGSHLYTSLPSLGLEQPLALTKNSLDASRPAGLSPTLTPGERQQNRPSVITCASAGARNCNLSHCPIAHSGCAAPGPASYRRPPSAATTCDPVVEEAARRSLGKNYKEPEPAPNSVSITGSVDDAAAKALGDTWLQIKAAKDGASSSPESASRRGQPASPSAHMVSHSHSPSVVS

SEQ ID NO: 491 - protein, 136 aa, Artificial Sequence
  Synthetic: SQT.(nt)VGLL4-TDU1.(sv40NLS) ORF amino acid sequence without v5 tag
MIPRDPVVEEHFRRSLGKNYKEGLSEAKPATPEIQEIVDKVKPQLEEKTNETYGKLEAVQYKTQVLASTNYYIKVRAGDNKYMHLKVFNGPPGQNADRVLTGYQVDKNKDDELTGFPKKKRKVPKKKKVPKKKRKV

SEQ ID NO: 492 - protein, 135 aa, Artificial Sequence
  Synthetic: SQT.(L1)VGLL4-TDU1.(sv40NLS) ORF amino acid sequence without v5 tag
MIPRGLSEAKPATPEIQEIVDKVKPQLEEKTNETYGKLEAVQYKTQVLDPVVEEHFRRSLGKNYKASTNYYIKVRAGDNKYMHLKVFNGPPGQNADRVLTGYQVDKNKDDELTGFPKKKRKVPKKKRVPKKKRKV

SEQ ID NO: 493 - protein, 135 aa, Artificial Sequence
  Synthetic: SQT.(L2)VGLL4-TDU1.(sv40NLS) ORF amino acid sequence without v5 tag
MIPRGLSEAKPATPEIQEIVDKVKPQLEEKTNETYGKLEAVQYKTQVLASTNYYIKVRAGDNKYMHLKVFNGPDPVVEEHFRRSLGKNYKPGQNADRVLTGYQVDKNKDDELTGFPKKKRKVPKKKRVPKKKRKV

SEQ ID NO: 494 - protein, 142 aa, Artificial Sequence
  Synthetic: SQT.(nt)VGLL4-TDU2.(sv40NLS) ORF amino acid sequence without v5 tag
MIPRSVSITGSVDDHFAKALGDTWLQIKGLSEAKPATPEIQEIVDKVKPQLEEKTNETYGKLEAVQYKTQVLASTNYYIKVRAGDNKYMHLKVFNGPPGQNADRVLTGYQVDKNKDDELTGFPKKKRVPKKKRKVPKKKRKV

SEQ ID NO: 495 - protein, 142 aa, Artificial Sequence
  Synthetic: SQT.(L1)VGLL4-TDU2.(sv40NLS) ORF amino acid sequence without v5 tag
MIPRGLSEAKPATPEIQEIVDKVKPQLEEKTNETYGKLEAVQYKTQVLSVSITGSVDDHFAKALGDTWLQIKASTNYYIKVRAGDNKYMHLKVFNGPPGQNADRVLTGYQVDKNKDDELTGFPKKKRVPKKKRKVPKKKRKV

SEQ ID NO: 496 - protein, 142 aa, Artificial Sequence
  Synthetic: SQT.(L2)VGLL4-TDU2.(sv40NLS) ORF amino acid sequence without v5 tag
MIPRGLSEAKPATPEIQEIVDKVKPQLEEKTNETYGKLEAVQYKTQVLASTNYYIKVRAGDNKYMHLKVFNGPSVSITGSVDDHFAKALGDTWLQIKPGQNADRVLTGYQVDKNKDDELTGFPKKKRVPKKKRKVPKKKRKV

SEQ ID NO: 497 - protein, 71 aa, Artificial Sequence
  Synthetic: huVGLL4-TDU1(NLS) ORF amino acid sequence without v5 tag
STMGDPVVEEHFRRSLGKNYKEPEMTYPRRRFRRRRHRPRSHLGQILRRRPWLVHPRHRYRWRRKNGIFNT

SEQ ID NO: 498 - protein, 80 aa, Artificial Sequence
  Synthetic: huVGLL4-TDU2(NLS) ORF amino acid sequence without v5 tag
STMSVSITGSVDDHFAKALGDTWLQIKAAKDSAMTYPRRRFRRRRHRPRSHLGQILRRRPWLVHPRHRYRWRRKNGIFNT

SEQ ID NO: 499 - protein, 116 aa, Artificial Sequence
  Synthetic: TandemPep.VGLL4.superTDU ORF
MSVDDHFAKSLGDTWLQIGSGVKQTLNFDLLKLAGDVESNPGPSVDDHFAKSLGDTWLQIGSGVKQTLNFDLLKLAGDVESNPGPSVDDHFAKSLGDTWLQIGKPIPNPLLGLDST

SEQ ID NO: 500 - protein, 118 aa, Artificial Sequence
  Synthetic: TandemPep.VGLL4.TDU1 ORF
MSVDDHFAKSLGDTWLQIGSGVKQTLNFDLLKLAGDVESNPGPDPVVEEHFRRSLGKNYKEGSGVKQTLNFDLLKLAGDVESNPGPDPVVEEHFRRSLGKNYKEGKPIPNPLLGLDST

SEQ ID NO: 501 - protein, 137 aa, Artificial Sequence
  Synthetic: TandemPep.VGLL4.TDU2 ORF
MSVSITGSVDDHFAKALGDTWLQIKGSGVKQTLNFDLLKLAGDVESNPGPSVSITGSVDDHFAKALGDTWLQIKGSGVKQTLNFDLLKLAGDVESNPGPSVSITGSVDDHFAKALGDTWLQIKGKPIPNPLLGLDST

SEQ ID NO: 502 - protein, 209 aa, Artificial Sequence
  Synthetic: TandemPep.HFMF4A ORF
MSVDDAAAKSLGDTWLQIGGSGNPKTANVPQTVPARLRKLPDSAFKPPEGSGVKQTLNFDLLKLAGDVESNPGPSVDDAAAKSLGDTWLQIGGSGNPKTANVPQTVPARLRKLPDSAFKPPEGSGVKQTLNFDLLKLAGDVESNPGPSVDDAAAKSLGDTWLQIGGSGNPKTANVPQTVPARLRKLPDSAFKPPEGKPIPNPLLGLDST

SEQ ID NO: 503 - protein, 209 aa, Artificial Sequence
  Synthetic: TandemPep.MF2A ORF
MSVDDHFAKSLGDTWLQIGGSGNPKTANVPQTVPARLRKLPDSAFKPPEGSGVKQTLNFDLLKLAGDVESNPGPSVDDHFAKSLGDTWLQIGGSGNPKTANVPQTVPARLRKLPDSAFKPPEGSGVKQTLNFDLLKLAGDVESNPGPSVDDHFAKSLGDTWLQIGGSGNPKTANVPQTVPARLRKLPDSAFKPPEGKPIPNPLLGLDST

SEQ ID NO: 504 - protein, 102 aa, Artificial Sequence
  Synthetic: TandemPep.VGLL4.superTDU ORF amino acid sequence without v5 tag
MSVDDHFAKSLGDTWLQIGSGVKQTLNFDLLKLAGDVESNPGPSVDDHFAKSLGDTWLQIGSGVKQTLNFDLLKLAGDVESNPGPSVDDHFAKSLGDTWLQI

SEQ ID NO: 505 - protein, 105 aa, Artificial Sequence
  Synthetic: TandemPep.VGLL4.TDU2 ORF amino acid sequence without v5 tag
MDPVVEEHFRRSLGKNYKEGSGVKQTLNFDLLKLAGDVESNPGPDPVVEEHFRRSLGKNYKEGSGVKQTLNFDLLKLAGDVESNPGPDPVVEEHFRRSLGKNYKE

SEQ ID NO: 506 - protein, 195 aa, Artificial Sequence
  Synthetic: TandemPep.HFMF4A ORF amino acid sequence without v5 tag
MSVDDAAAKSLGDTWLQIGGSGNPKTANVPQTVPARLRKLPDSAFKPPEGSGVKQTLNFDLLKLAGDVESNPGPSVDDAAAKSLGDTWLQIGGSGNPKTANVPQTVPARLRKLPDSAFKPPEGSGVKQTLNFDLLKLAGDVESNPGPSVDDAAAKSLGDTWLQIGGSGNPKTANVPQTVPARLRKLPDSAFKPPE

SEQ ID NO: 507 - protein, 195 aa, Artificial Sequence
  Synthetic: TandemPep.MF2A ORF amino acid sequence without v5 tag
MSVDDHFAKSLGDTWLQIGGSGNPKTANVPQTVPARLRKLPDSAFKPPEGSGVKQTLNFDLLKLAGDVESNPGPSVDDHFAKSLGDTWLQIGGSGNPKTANVPQTVPARLRKLPDSAFKPPEGSGVKQTLNFDLLKLAGDVESNPGPSVDDHFAKSLGDTWLQIGGSGNPKTANVPQTVPARLRKLPDSAFKPPE

SEQ ID NO: 508 - DNA, 330 bp, Artificial Sequence
  Synthetic: Super TDU(NLS).cV5
atgtctgtggatgatcatttcgccaagagcctgggagatacatggttgcagatcggagggagcggcaatcccaaaacagccaacgttcctcaaaccgtaccaatgaggctcaggaaactgcctgatagcttcttcaaaccccctgaaatgacctacccacgtaggagattcagaagacgcagacatcggccaaggtcacatcttggacagattctgcgacggcgcccttggctggtgcatcctcggcatcggtatcgatggcggcgcaaaaacgggatttttaacaccggaaaaccaatccccaatccgctgctggggctggacagtacg

SEQ ID NO: 509 - DNA, 267 bp, Artificial Sequence
  Synthetic: Super TDU(sv40NLS).cV5
atgagtgttgatgaccattttgctaaatcactgggcgacacgtggcttcagataggcggaagtgggaatccaaaaaccgccaacgtgccacagacagtcccaatgcgcctgcgcaagcttcccgatagcttttttaagcccccggaacccaaaaaaaagagaaaggtgcccaaaaaaaaacggaaggtacctaagaagaagcgcaaggtcggcatcttcaacacaggaaaaccaatacctaatccgcttcttggcttagacagtacc

SEQ ID NO: 510 - DNA, 330 bp, Artificial Sequence
  Synthetic: MF2A(NLS).cV5
atgtcagtggacgatcacttcgctaaaagtctgggagacacatggttacagatcggcggctctggaaatccaaagaccgccaacgtgcctcaaaccgtccccgctagactaagaaagctcccggattcagcatttaaaccacctgaaatgacttatcccagacgtcgcttcaggcggcgccggcacagaccccgctcacatctgggacagattctcaggcggagaccatggcttgtccacccccgacacagatacaggtggcgcagaaagaacggtatctttaatactggcaagccaataccaaacccgctgctcggcctggattctacg

SEQ ID NO: 511 - DNA, 252 bp, Artificial Sequence
  Synthetic: MF2A(sv40NLS).cV5
atgtcagtggatgatcactttgccaagagcctaggcgacacatggctgcagattggtgggagtgggaatcccaagaccgccaatgttccccagaccgtgccagcgcggcttagaaaacttcccgactccgcctttaaaccgcctgaacctaaaaaaaaaaggaaagtcccgaagaagaaacgaaaagtacccaagaagaagaggaaagtcggcaagcccattcctaaccctctcttgggactggactccacc

SEQ ID NO: 512 - DNA, 330 bp, Artificial Sequence
  Synthetic: HFMF4A(NLS).cV5
atgtccgttgatgacgccgcggcaaagagcctcggagatacctggctccagatcggtggatctggaaacccaaagaccgccaacgtgcctcagactgtacctgcccgcttacggaaattgcccgactccgctttcaaacctcctgagatgacctatccaaggagacggttccgcagacgacgccaccgaccaaggtcgcatctagggcagattctgagaaggcggccatggctggtccaccccaggcatagatataggtggcggcgtaaaaatgggatctttaacacaggaaaaccgatccctaacccactgcttggactggactctacc

SEQ ID NO: 513 - DNA, 252 bp, Artificial Sequence
  Synthetic: HFMF4A(sv40NLS).cV5
atgtccgtagatgacgccgctgcgaagtcactaggagatacgtggctgcaaattggagggtccggcaaccccaagacagccaacgtaccacagacggttccagcccgcttgcgtaagctgcctgattctgcgttcaaacctccggagcctaaaaagaaacgcaaagttcctaaaaaaaagcgcaaagtgcccaagaagaagcgaaaagttggaaaaccaattcccaaccctctgctgggtctcgactccacg

SEQ ID NO: 514 - DNA, 360 bp, Artificial Sequence
  Synthetic: huVGLL4-TDU1.2(NLS).cV5
atgagtactatgggagatccggtggttgaagagcatttcagaagaagtctcggcaaaaactacaaggaaccagaacctgctcccaacagcgtgtctatcacgggtagcgtcgatgatcatttcgcaaaggcactcggggatacttggctacagattaaggcggcaaaggatagtgctatgacttacccacggcgcaggttccggcgccgtaggcacagacccaggagccatttgggtcagatactccgccgcaggccatggttagtgcaccccagacatagatacaggtggaggagaaagaacggtattttcaacactggaaagcccattcccaatcccctgctaggcctcgattccact

SEQ ID NO: 515 - DNA, 282 bp, Artificial Sequence
  Synthetic: huVGLL4-TDU1.2(sv40NLS).cV5
atgagtactatgggggatcccgttgtagaggagcattttcgcaggagtctgggtaagaattacaaagagcctgaacccgcgcccaatagcgtttccatcacaggaagcgttgacgatcacttcgcgaaggctctgggtgacacgtggctccagatcaaagccgcaaaggattccgcgcccaagaagaagcggaaggtgcccaagaaaaaaaggaaggttccgaaaaaaaagaggaaagttgggaagcctatccccaaccccctactgggactggacagcacc

SEQ ID NO: 516 - DNA, 216 bp, Artificial Sequence
  Synthetic: huVGLL4-TDU1(NLS).cV5
atgtccaccatgggagaccccgtcgtcgaagagcattttagaaggagtctcggcaaaaactataaggaaccagagatgacatatccccggagacgcttccgccggaggcggcatagacctcggtcccacctcggccagatcctccgccgtaggccatggcttgttcacccacggcataggtatagatggcggaggaagaatgggatttttaacaca

SEQ ID NO: 517 - DNA, 243 bp, Artificial Sequence
  Synthetic: huVGLL4-TDU2(NLS).cV5
atgtctacaatgagcgtgtcaataacaggtagtgtagatgaccacttcgctaaagctctgggggatacgtggcttcagattaaagctgctaaggatagtgcaatgacctaccccaggcgccggttccggcgacgtcgccaccgcccacgatctcatcttgggcagatcttacgccggcgcccctggctggttcatccccgacatagataccggtggaggaggaagaacggcattttcaataca

SEQ ID NO: 518 - DNA, 912 bp, Artificial Sequence
  Synthetic: huVGLL4.cV5
atggaaaccccactcgacgtcctatctagggcagccagcctggtgcacgccgacgatgaaaaacgggaagcagccctgcggggtgaaccgcgtattcaaaccttgccagtagcctcagccttaagcagtcatcgtaccggtccaccaccaataagcccaagtaaacgcaaattctccatggagcctggagatgaagatcttgactgtgacaacgatcatgtgagcaaaatgtcccgcatctttaaccctcacctgaataaaactgctaatggagactgtcgacgggatcctagggaaagatctcgttcacctattgaacgagctgtggccccaacaatgagtcttcacggctcacacctgtacacctctttgccatctctaggactcgagcagcctctcgccttgactaagaattcactggatgcctcaaggcccgcggggcttagtcccacactgacccccggtgagcggcagcagaatcgaccatccgttatcacctgcgcctctgcaggggcaagaaactgtaacttatctcattgccctatcgcacatagtggatgtgccgcccccggcccagcttcttatcggcggccacctagcgcagcaaccacttgtgatccagtagtggaggagcattttaggaggtccctgggtaaaaactataaagagccagaaccagcgcctaacagtgtgtccattacaggctcagtggatgatcatttcgcaaaggctctgggggatacatggttgcagatcaaagccgctaaagacggcgccagctccagtccggagtctgcttcgaggcgggggcagcccgcgtcccctagcgcccatatggttagccattcacatagcccctcagttgtgtctggcaaacctatccccaaccctctactgggtctggatagcact

SEQ ID NO: 519 - DNA, 912 bp, Artificial Sequence
  Synthetic: huVGLL4(HF4A).cV5
atggaaacacctctggacgtcctgtcaagagccgcctcactcgttcacgcggacgacgagaaacgggaggccgcactgcgtggcgaaccacgcatccagaccctacccgttgcttctgcgttgtccagccatagaaccgggcccccaccaatctcaccctctaaacgcaagttttccatggaacccggtgacgaggacttggactgtgataatgatcatgtgtcaaaaatgtcgcgcatcttcaatccacacctgaacaagacggctaatggcgactgtcgacgggaccctcgcgagaggtcccggagcccaatcgaacgtgccgtggcccctactatgagtctccacggctcacatctatacacctctctcccgtcactgggtctggaacaaccactcgccctcaccaagaatagcctggatgcatcccgccctgctggccttagtcctactctcacaccgggtgagaggcagcagaacaggccctctgtcataacctgtgcatcagcaggcgcccgcaattgcaacctgagccactgtccaatcgcccatagtgggtgcgctgcccctggtcctgcttcgtacaggcgccccccgtccgcagccacaacgtgtgatcccgttgtggaggaagcggcccgcagatccctcggcaagaattataaggagcccgagcccgcaccaaatagtgtcagcatcacagggagcgtcgacgacgctgctgctaaggccctgggcgatacctggctgcagatcaaagcggcgaaagatggagcatcctcatcaccagagtctgccagtagaagaggccagcctgcaagtccaagtgcccacatggtatcacactcccacagtccctccgttgtgagcggaaagcctatccccaacccactgctcgggctagactctacc

SEQ ID NO: 520 - DNA, 446 bp, Artificial Sequence
  Synthetic: SQT.(nt)VGLL4-TDU1.(sv40NLS).cV5
atgatcccacgagatcccgtggttgaggagcattttcgcaggagcctgggaaaaaattacaaggaagggctcagtgaagcaaagccagccacccctgaaattcaggaaatcgttgacaaagttaagcctcaattggaggagaagactaatgagacttacggaaaattggaggcagtgcagtacaaaacacaagtcttggcttcgacgaattactacatcaaggtaagagcgggggataataaatatatgcacctgaaagttttcaacggcccacctggtcagaacgcggaccgggtactgacgggctatcaggtggataagaataaggacgatgagctgacaggtttccctaaaaagaagcggaaagtcccaaagaagaagcggaaggtgccaaagaaaaaacgaaaagttggcaagcccatccctaaccccctcctgggcctaga

SEQ ID NO: 521 - DNA, 450 bp, Artificial Sequence
  Synthetic: SQT.(L1)VGLL4-TDU1.(sv40NLS).cV5
atgatcccacgcggactgtccgaggccaaacctgccacccccgaaatccaggaaatcgttgacaaggtaaaacctcaactagaagagaaaaccaatgagacttacgggaaactggaagccgtgcagtacaagacgcaggtgctcgatcccgtggtggaagagcactttagacggagtctaggcaaaaactataaagccagtacgaactattacataaaggtgcgtgccggcgacaacaaatacatgcacctgaaagtcttcaacggccctcctgggcaaaacgccgatcgggttctgacaggctatcaggtggacaaaaataaggacgacgagctcactggctttcctaaaaagaaacgcaaggtacctaaaaaaaagaggaaagttcccaaaaagaagcggaaggtggggaagccgatcccaaacccattactggggttagactctaca

SEQ ID NO: 522 - DNA, 447 bp, Artificial Sequence
  Synthetic: SQT.(L2)VGLL4-TDU1.(sv40NLS).cV5
atgatcccacgggggctctctgaagccaagccagcaacccccgaaatccaagaaatcgtcgacaaggtgaagccacagctggaagagaagactaacgagacatacgggaagctcgaggcagtacagtataaaacacaggtgctggcaagtactaattactatattaaggtccgtgccggtgacaacaagtatatgcacctgaaggtctttaatggcccagaccctgtggtcgaggagcacttcagacggagcttgggcaagaactataagccgggtcagaacgccgatcgagtgctgaccgggtaccaggttgataagaataaagatgatgagcttactggattcccaaaaaaaaaaagaaaggtgcccaaaaagaagcgaaaagtgcctaagaagaaaagaaaggtaggtaagcccattccaaacccactgctaggcctcgatagt

SEQ ID NO: 523 - DNA, 471 bp, Artificial Sequence
  Synthetic: SQT.(nt)VGLL4-TDU2.(sv40NLS).cV5
atgattccccggtcagtctcgattaccggatctgtggacgaccacttcgctaaggcattgggcgacacctggcttcagattaagggtttgagcgaagccaagccagcaactcctgagatccaagagattgtggataaagtcaagccacagttggaagaaaagacaaatgagacatacggtaagctggaggcagtccagtacaaaacacaggtcctagcatctacaaattattacataaaggtgagagctggcgacaataagtacatgcacttaaaggtgttcaacggcccgcccggtcaaaacgccgacagggtgctgactgggtatcaggtcgacaagaataaagatgacgagctcaccggcttccctaaaaagaaaaggaaagtgcctaagaagaaacgcaaagtgccaaagaaaaaacgcaaggtgggcaagcctatccctaatccgctcttaggcttggactccact

SEQ ID NO: 524 - DNA, 471 bp, Artificial Sequence
  Synthetic: SQT.(L1)VGLL4-TDU2.(sv40NLS).cV5
atgattcctaggggtctttcagaagcaaagcctgccacacccgaaatccaggaaattgtagacaaggtcaaacctcaactggaggagaagaccaacgaaacctacggtaagctggaagccgtgcagtacaagacacaagttctgtcagtgtccattaccggatctgtggatgaccatttcgctaaggcactgggggacacttggctgcagataaaggcttctacaaattattatattaaggtgagggctggggacaataagtacatgcacttgaaggtctttaatggtcccccagggcagaacgctgaccgcgtgctcacgggatatcaggttgataaaaacaaggacgacgaactgaccggattccctaaaaaaaaacggaaagttcccaagaaaaaacgaaaagtgcctaaaaagaagagaaaggttggcaaacctattcccaaccctctgcttggtctcgactccaca

SEQ ID NO: 525 - DNA, 471 bp, Artificial Sequence
  Synthetic: SQT.(L2)VGLL4-TDU2.(sv40NLS).cV5
atgattccccggggtctgagtgaagctaagccagcaacccctgaaatacaagaaatcgtggataaggtgaagccccagctggaggaaaaaacaaacgagacgtacggcaagcttgaggccgtgcagtacaaaacccaagtgttggctagtaccaactactatattaaggtgagggccggcgataataagtacatgcacctgaaggtgtttaacggaccctctgtgtccatcaccggatccgtagatgaccacttcgctaaggcgctaggcgatacctggctgcaaataaaacccggtcagaacgccgacagagttttaactggatatcaagtcgacaagaataaggacgatgagctcactggctttcccaaaaaaaaaagaaaggttcctaagaagaaaaggaaagtccccaaaaagaaacggaaggtgggtaagccaatccctaatcctctgctcggactagatagcact

SEQ ID NO: 526 - DNA, 559 bp, Artificial Sequence
  Synthetic: TandemPep.VGLL4.superTDU
tcaagcttttggaccctcgtacagaagctaatacgactcactatagggaaataagagagaaaagaagagtaagaagaaatataagagccaccatgagcgtcgacgatcacttcgccaagtctctgggcgacacctggctgcagatcggcagcggcgtgaagcaaaccctgaacttcgacctgctgaaactggccggcgatgtggagagcaaccccggcccgtcagtggacgaccacttcgccaagagcctgggagacacctggctgcagatcggcagcggcgtgaagcagaccttaaacttcgacctgctgaagctggctggtgacgtggagtcgaaccccggccccagcgtggacgaccactttgccaagtcactgggggacacctggcttcaaatcggcaagcccatccccaaccccctgctgggcctggacagcacctgataataggctggagcctcggtggccatgcttcttgccccttgggcctccccccagcccctcctccccttcctgcacccgtacccccgtggtctttgaataaagtctgagtgggcggc

SEQ ID NO: 527 - DNA, 348 bp, Artificial Sequence
  Synthetic: TandemPep.VGLL4.superTDU ORF
atgagcgtcgacgatcacttcgccaagtctctgggcgacacctggctgcagatcggcagcggcgtgaagcaaaccctgaacttcgacctgctgaaactggccggcgatgtggagagcaaccccggcccgtcagtggacgaccacttcgccaagagcctgggagacacctggctgcagatcggcagcggcgtgaagcagaccttaaacttcgacctgctgaagctggctggtgacgtggagtcgaaccccggccccagcgtggacgaccactttgccaagtcactgggggacacctggcttcaaatcggcaagcccatccccaaccccctgctgggcctggacagcacc

SEQ ID NO: 528 - DNA, 559 bp, Artificial Sequence
  Synthetic: TandemPep.VGLL4.superTDU_(codon optimized)
tcaagcttttggaccctcgtacagaagctaatacgactcactatagggaaataagagagaaaagaagagtaagaagaaatataagagccaccatgtccgtcgacgatcactttgcgaagtcactcggagacacctggctccaaatcggctccggtgtcaagcagaccttgaatttcgaccttctgaagctggccggcgacgtggagagcaacccaggcccttcggtggacgatcatttcgctaagagcctgggcgacacttggctgcaaatcggatccggagtgaagcagaccctgaacttcgatctgctcaagctcgccggagatgtggaatccaaccccggaccttccgtggacgaccacttcgccaaatcgctgggggacacgtggctgcagatcgggaagcccattccgaacccgctgctgggtctggacagcacctgataataggctggagcctcggtggccatgcttcttgccccttgggcctccccccagcccctcctccccttcctgcacccgtacccccgtggtctttgaataaagtctgagtgggcggc

SEQ ID NO: 529 - DNA, 348 bp, Artificial Sequence
  Synthetic: TandemPep.VGLL4.superTDU_(codon optimized) ORF
atgtccgtcgacgatcactttgcgaagtcactcggagacacctggctccaaatcggctccggtgtcaagcagaccttgaatttcgaccttctgaagctggccggcgacgtggagagcaacccaggcccttcggtggacgatcatttcgctaagagcctgggcgacacttggctgcaaatcggatccggagtgaagcagaccctgaacttcgatctgctcaagctcgccggagatgtggaatccaaccccggaccttccgtggacgaccacttcgccaaatcgctgggggacacgtggctgcagatcgggaagcccattccgaacccgctgctgggtctggacagcacc

SEQ ID NO: 530 - DNA, 568 bp, Artificial Sequence
  Synthetic: TandemPep.VGLL4.TDU1
tcaagcttttggaccctcgtacagaagctaatacgactcactatagggaaataagagagaaaagaagagtaagaagaaatataagagccaccatggaccccgtggtggaggagcacttcaggagaagcctgggcaagaactacaaggagggcagcggcgtaaagcagaccctgaacttcgacctactgaaactggccggcgacgtggagagcaaccccggtcccgaccctgtggtggaggagcacttccgaagaagcctgggcaagaactacaaggagggctccggcgtgaagcagaccctgaacttcgatctgctgaagctggctggcgatgtggaaagcaaccccggccccgatccggtggtggaggagcacttcagaagatccctgggcaagaactacaaagagggcaagcccatccccaaccccctgctgggcctggacagcacctgataataggctggagcctcggtggccatgcttcttgccccttgggcctccccccagcccctcctccccttcctgcacccgtacccccgtggtctttgaataaagtctgagtgggcggc

SEQ ID NO: 531 - DNA, 357 bp, Artificial Sequence
  Synthetic: TandemPep.VGLL4.TDU1 ORF
atggaccccgtggtggaggagcacttcaggagaagcctgggcaagaactacaaggagggcagcggcgtaaagcagaccctgaacttcgacctactgaaactggccggcgacgtggagagcaaccccggtcccgaccctgtggtggaggagcacttccgaagaagcctgggcaagaactacaaggagggctccggcgtgaagcagaccctgaacttcgatctgctgaagctggctggcgatgtggaaagcaaccccggccccgatccggtggtggaggagcacttcagaagatccctgggcaagaactacaaagagggcaagcccatccccaaccccctgctgggcctggacagcacc

SEQ ID NO: 532 - DNA, 568 bp, Artificial Sequence
  Synthetic: TandemPep.VGLL4.TDU1_(codon optimized)
tcaagcttttggaccctcgtacagaagctaatacgactcactatagggaaataagagagaaaagaagagtaagaagaaatataagagccaccatggatccagtggtggaggaacatttccgccggtcactgggaaagaactataaggagggctccggagtgaagcagactttgaactttgatctgctgaagctggccggcgacgtggaaagcaaccctggtcctgatccggtcgtggaggagcacttccggagaagcctggggaagaactacaaggaaggatccggcgtgaagcaaaccctcaacttcgacctcctgaagctcgccggggacgtcgagtcgaaccccggtcccgacccggtggtggaagaacacttcaggcgctcccttggaaagaattacaaggagggcaaaccgatccccaaccctctgctgggactggacagcacctgataataggctggagcctcggtggccatgcttcttgccccttgggcctccccccagcccctcctccccttcctgcacccgtacccccgtggtctttgaataaagtctgagtgggcggc

SEQ ID NO: 533 - DNA, 357 bp, Artificial Sequence
  Synthetic: TandemPep.VGLL4.TDU1_(codon optimized)ORF
atggatccagtggtggaggaacatttccgccggtcactgggaaagaactataaggagggctccggagtgaagcagactttgaactttgatctgctgaagctggccggcgacgtggaaagcaaccctggtcctgatccggtcgtggaggagcacttccggagaagcctggggaagaactacaaggaaggatccggcgtgaagcaaaccctcaacttcgacctcctgaagctcgccggggacgtcgagtcgaaccccggtcccgacccggtggtggaagaacacttcaggcgctcccttggaaagaattacaaggagggcaaaccgatccccaaccctctgctgggactggacagcacc

SEQ ID NO: 534 - DNA, 411 bp, Artificial Sequence
  Synthetic: TandemPep.VGLL4.TDU2 ORF
atgagcgttagtattaccggaagcgtggacgaccacttcgccaaggccctgggcgacacctggctgcaaattaagggcagcggcgtaaagcagaccctgaacttcgaccttctgaagctggctggcgatgtggagagtaaccccggccccagcgtgagcataaccggttcagtggacgatcatttcgccaaggcccttggcgacacgtggctgcagatcaaaggctccggcgtgaagcagaccctgaatttcgatctgctgaagttggccggcgacgtggagagcaaccccggccccagcgtgagcatcaccggcagcgtggacgaccacttcgccaaggccctgggcgacacctggctgcagatcaagggcaagcccatccccaaccccctgctgggcctggacagcacc

SEQ ID NO: 535 - DNA, 622 bp, Artificial Sequence
  Synthetic: TandemPep.VGLL4.TDU2_(codon optimized)
tcaagcttttggaccctcgtacagaagctaatacgactcactatagggaaataagagagaaaagaagagtaagaagaaatataagagccaccatgtcggtgtcaatcaccggctccgtggatgaccacttcgccaaggcgcttggagatacctggctgcagattaaggggtccggcgtcaagcagactctcaacttcgatctgctcaagctggctggcgatgtggagagcaacccgggtccctcagtgtccattaccggatccgtcgacgaccatttcgccaaagccctgggagacacttggctgcaaatcaaggggagcggagtgaagcagaccctgaacttcgacctgttgaagctggccggcgacgtggaatccaatccgggcccttccgtgagcatcaccggttcggtggacgaccactttgcgaaggcactcggagacacgtggctccagatcaagggaaagcccatccctaacccactgctggggctggacagcacctgataataggctggagcctcggtggccatgcttcttgccccttgggcctccccccagcccctcctccccttcctgcacccgtacccccgtggtctttgaataaagtctgagtgggcggc

SEQ ID NO: 536 - DNA, 411 bp, Artificial Sequence
  Synthetic: TandemPep.VGLL4.TDU2_(codon optimized)ORF
atgtcggtgtcaatcaccggctccgtggatgaccacttcgccaaggcgcttggagatacctggctgcagattaaggggtccggcgtcaagcagactctcaacttcgatctgctcaagctggctggcgatgtggagagcaacccgggtccctcagtgtccattaccggatccgtcgacgaccatttcgccaaagccctgggagacacttggctgcaaatcaaggggagcggagtgaagcagaccctgaacttcgacctgttgaagctggccggcgacgtggaatccaatccgggcccttccgtgagcatcaccggttcggtggacgaccactttgcgaaggcactcggagacacgtggctccagatcaagggaaagcccatccctaacccactgctggggctggacagcacc

SEQ ID NO: 537 - DNA, 838 bp, Artificial Sequence
  Synthetic: TandemPep.HFMF4A
tcaagcttttggaccctcgtacagaagctaatacgactcactatagggaaataagagagaaaagaagagtaagaagaaatataagagccaccatgtccgtggacgacgccgccgcgaagagcctgggcgacacctggctgcagatcggcggaagcggcaatcccaagaccgccaacgtgccccaaaccgtgcccgcccgcctgagaaaactgcccgatagcgccttcaagccgccggagggtagcggcgtgaagcaaaccctgaacttcgaccttctgaagctggctggcgacgtagaaagcaaccccggccctagcgttgacgacgccgccgccaagagcctgggtgacacatggctacagataggcggctcgggcaaccccaagactgccaatgtgccccagaccgtgcctgctagactgagaaaactgcccgacagcgccttcaagcctcctgaagggagcggggtgaagcagaccttgaactttgatctgttgaagctggccggcgatgtagagagcaatcctggccccagcgtggacgacgctgccgccaagtcactgggcgacacctggttacagattggtggcagcggtaaccccaaaaccgccaacgtcccacagaccgtacccgccagactgagaaagctgcccgacagcgccttcaagccccccgagggcaagcccattcccaaccccctgctggggctggacagcacctgataataggctggagcctcggtggccatgcttcttgccccttgggcctccccccagcccctcctccccttcctgcacccgtacccccgtggtctttgaataaagtctgagtgggcggc

SEQ ID NO: 538 - DNA, 627 bp, Artificial Sequence
  Synthetic: TandemPep.HFMF4A ORF
atgtccgtggacgacgccgccgcgaagagcctgggcgacacctggctgcagatcggcggaagcggcaatcccaagaccgccaacgtgccccaaaccgtgcccgcccgcctgagaaaactgcccgatagcgccttcaagccgccggagggtagcggcgtgaagcaaaccctgaacttcgaccttctgaagctggctggcgacgtagaaagcaaccccggccctagcgttgacgacgccgccgccaagagcctgggtgacacatggctacagataggcggctcgggcaaccccaagactgccaatgtgccccagaccgtgcctgctagactgagaaaactgcccgacagcgccttcaagcctcctgaagggagcggggtgaagcagaccttgaactttgatctgttgaagctggccggcgatgtagagagcaatcctggccccagcgtggacgacgctgccgccaagtcactgggcgacacctggttacagattggtggcagcggtaaccccaaaaccgccaacgtcccacagaccgtacccgccagactgagaaagctgcccgacagcgccttcaagccccccgagggcaagcccattcccaaccccctgctggggctggacagcacc

SEQ ID NO: 539 - DNA, 838 bp, Artificial Sequence
  Synthetic: TandemPep.HFMF4A(codon optimized)
tcaagcttttggaccctcgtacagaagctaatacgactcactatagggaaataagagagaaaagaagagtaagaagaaatataagagccaccatgagcgtggatgatgcagcggcgaagtccctgggggatacatggcttcagattggtggatcggggaaccctaagactgccaacgtcccgcaaactgtgcctgctcgcctgaggaagctcccggactctgccttcaaaccccctgaaggctcaggagtcaagcagactctcaactttgacctccttaagctggccggggatgtggagtcgaaccccgggccttccgtcgacgacgccgctgctaagtccctcggagacacctggctgcagatcggcggatcgggcaaccccaagacggccaatgtgccacagaccgtgcccgcccggctgagaaagctgccggacagcgcgttcaagcctcctgaaggatccggcgtgaagcagaccctgaacttcgacttgctgaaactggccggcgacgtggaatcaaacccgggaccgagcgtggacgacgcggccgccaaatccctgggcgacacttggctccaaatcggtggatccggcaatcccaagaccgccaacgtgccccagaccgtcccggcccggctgcgcaagttgccagattccgcattcaagccgcctgagggaaagccgatcccgaaccccctgctcggtctggatagcacctgataataggctggagcctcggtggccatgcttcttgccccttgggcctccccccagcccctcctccccttcctgcacccgtacccccgtggtctttgaataaagtctgagtgggcggc

SEQ ID NO: 540 - DNA, 627 bp, Artificial Sequence
  Synthetic: TandemPep.HFMF4A(codon optimized)ORF
atgagcgtggatgatgcagcggcgaagtccctgggggatacatggcttcagattggtggatcggggaaccctaagactgccaacgtcccgcaaactgtgcctgctcgcctgaggaagctcccggactctgccttcaaaccccctgaaggctcaggagtcaagcagactctcaactttgacctccttaagctggccggggatgtggagtcgaaccccgggccttccgtcgacgacgccgctgctaagtccctcggagacacctggctgcagatcggcggatcgggcaaccccaagacggccaatgtgccacagaccgtgcccgcccggctgagaaagctgccggacagcgcgttcaagcctcctgaaggatccggcgtgaagcagaccctgaacttcgacttgctgaaactggccggcgacgtggaatcaaacccgggaccgagcgtggacgacgcggccgccaaatccctgggcgacacttggctccaaatcggtggatccggcaatcccaagaccgccaacgtgccccagaccgtcccggcccggctgcgcaagttgccagattccgcattcaagccgcctgagggaaagccgatcccgaaccccctgctcggtctggatagcacc

SEQ ID NO: 541 - DNA, 838 bp, Artificial Sequence
  Synthetic: TandemPep.MF2A
tcaagcttttggaccctcgtacagaagctaatacgactcactatagggaaataagagagaaaagaagagtaagaagaaatataagagccaccatgagcgtggacgaccacttcgccaagagcctgggcgacacctggttacagataggcgggtctggcaatcctaagaccgcgaacgttccccaaaccgtcccggccagactgagaaaactgccagatagcgccttcaagccccccgaaggtagcggcgtcaaacagacccttaatttcgatttactgaagctcgccggcgacgtggagtcgaaccccggccccagcgtggacgatcacttcgctaagtcgctgggcgacacctggctgcagattggcggctcgggaaaccccaagaccgccaacgtgccccagactgtgcccgctagactcagaaagcttcctgacagcgccttcaagccccccgaaggcagcggagttaaacaaaccttaaacttcgacctactgaaactggccggggacgtggagagcaatcccggtccctccgtcgacgatcacttcgcgaagagcctgggcgatacctggcttcagatcggcggcagcggcaatccaaagacagccaacgtgccacagaccgtgcccgccagactgagaaagctgcccgactcggccttcaagccacctgagggcaaacccatccccaaccccctgctgggactggacagcacctgataataggctggagcctcggtggccatgcttcttgccccttgggcctccccccagcccctcctccccttcctgcacccgtacccccgtggtctttgaataaagtctgagtgggcggc

SEQ ID NO: 542 - DNA, 627 bp, Artificial Sequence
  Synthetic: TandemPep.MF2A ORF
atgagcgtggacgaccacttcgccaagagcctgggcgacacctggttacagataggcgggtctggcaatcctaagaccgcgaacgttccccaaaccgtcccggccagactgagaaaactgccagatagcgccttcaagccccccgaaggtagcggcgtcaaacagacccttaatttcgatttactgaagctcgccggcgacgtggagtcgaaccccggccccagcgtggacgatcacttcgctaagtcgctgggcgacacctggctgcagattggcggctcgggaaaccccaagaccgccaacgtgccccagactgtgcccgctagactcagaaagcttcctgacagcgccttcaagccccccgaaggcagcggagttaaacaaaccttaaacttcgacctactgaaactggccggggacgtggagagcaatcccggtccctccgtcgacgatcacttcgcgaagagcctgggcgatacctggcttcagatcggcggcagcggcaatccaaagacagccaacgtgccacagaccgtgcccgccagactgagaaagctgcccgactcggccttcaagccacctgagggcaaacccatccccaaccccctgctgggactggacagcacc

SEQ ID NO: 543 - DNA, 838 bp, Artificial Sequence
  Synthetic: TandemPep.MF2A(co-opd)
tcaagcttttggaccctcgtacagaagctaatacgactcactatagggaaataagagagaaaagaagagtaagaagaaatataagagccaccatgtccgtggatgaccactttgctaagtcgctgggagatacctggctgcagatcggaggctccgggaacccaaagactgcgaacgtgccccagaccgtgccggcccggctgaggaagctgcctgactccgcgttcaagccgcccgaaggatccggagtgaagcagacgctgaatttcgatctgctcaagctggccggcgacgtggagtcgaacccgggtccgagcgtggacgatcatttcgcaaagtcactcggagacacttggctgcaaattgggggcagcggcaaccctaaaaccgccaacgtgccacagactgtgccggctagattgcggaagctccctgactcggccttcaagccccctgaaggcagcggggtcaagcagaccctcaacttcgaccttctcaagttggcgggagatgtcgagtcaaacccaggaccgtccgtcgacgatcacttcgccaaatccctgggcgacacctggcttcaaatcggcggttccggaaaccctaagactgcaaacgtccctcaaaccgtgcccgcccgcctgcgcaagctgccggacagcgccttcaaaccgcccgagggaaagcccatccccaatcccctgctgggtctggacagcacctgataataggctggagcctcggtggccatgcttcttgccccttgggcctccccccagcccctcctccccttcctgcacccgtacccccgtggtctttgaataaagtctgagtgggcggc

SEQ ID NO: 544 - DNA, 627 bp, Artificial Sequence
  Synthetic: TandemPep.MF2A(co-opd)  ORF
atgtccgtggatgaccactttgctaagtcgctgggagatacctggctgcagatcggaggctccgggaacccaaagactgcgaacgtgccccagaccgtgccggcccggctgaggaagctgcctgactccgcgttcaagccgcccgaaggatccggagtgaagcagacgctgaatttcgatctgctcaagctggccggcgacgtggagtcgaacccgggtccgagcgtggacgatcatttcgcaaagtcactcggagacacttggctgcaaattgggggcagcggcaaccctaaaaccgccaacgtgccacagactgtgccggctagattgcggaagctccctgactcggccttcaagccccctgaaggcagcggggtcaagcagaccctcaacttcgaccttctcaagttggcgggagatgtcgagtcaaacccaggaccgtccgtcgacgatcacttcgccaaatccctgggcgacacctggcttcaaatcggcggttccggaaaccctaagactgcaaacgtccctcaaaccgtgcccgcccgcctgcgcaagctgccggacagcgccttcaaaccgcccgagggaaagcccatccccaatcccctgctgggtctggacagcacc

SEQ ID NO: 545 - protein, 14 aa, Artificial Sequence
  Synthetic: V5 epitope tag
GKPIPNPLLGLDST

SEQ ID NO: 546 - protein, 114 aa, Artificial Sequence
  Synthetic: BeclinBH3x3.F2A , no epitope tag
MGTMENLSRRLKVTGDLFDIMSGSGVKQTLNFDLLKLAGDVESNPGPGTMENLSRRLKVTGDLFDIMSGSGVKQTLNFDLLKLAGDVESNPGPGTMENLSRRLKVTGDLFDIMS

SEQ ID NO: 547 - protein, 128 aa, Artificial Sequence
  Synthetic: BeclinBH3x3.F2A , V5 epitope tag
MGTMENLSRRLKVTGDLFDIMSGSGVKQTLNFDLLKLAGDVESNPGPGTMENLSRRLKVTGDLFDIMSGSGVKQTLNFDLLKLAGDVESNPGPGTMENLSRRLKVTGDLFDIMSGKPIPNPLLGLDST

SEQ ID NO: 548 - DNA, 384 bp, Artificial Sequence
  Synthetic: BeclinBH3x3.F2A , V5 epitope tag
atgggcaccatggagaatcttagcagacgactgaaagtgaccggcgatctgttcgacatcatgagcggcagcggcgtgaagcagaccctgaactttgacttgctgaagctggccggcgacgtggaaagcaaccccggacccggcaccatggagaacctgagccggcggctgaaggtgaccggcgacttgttcgacatcatgagcggcagcggagtgaagcagactttgaacttcgaccttctgaaactggccggcgatgtggagagcaatccaggcccgggcaccatggagaatctgagcagaagactgaaggtgactggcgacctgttcgacattatgagcggcaagcccatccccaaccccctgctgggtctggatagcacc

SEQ ID NO: 549 - DNA, 384 bp, Artificial Sequence
  Synthetic: BeclinBH3x3.F2A , V5 epitope tag
atgggaactatggagaacctgtcgcggaggttgaaagtgaccggcgacctgtttgacattatgtccggctccggagtgaagcagaccctgaacttcgaccttttgaagctggccggcgacgtggaatcgaacccaggccctggtactatggaaaacctcagcagacgcctgaaagtcaccggagatctgttcgacatcatgagcggatccggcgtgaagcaaactctgaatttcgacctcctgaagcttgcgggagatgtggagtcaaacccggggcccggtaccatggaaaatctgtcccgccggctcaaggtcaccggggacctgttcgatatcatgtccgggaagcctatccccaacccgctgctgggactcgacagcacc

SEQ ID NO: 550 - DNA, 622 bp, Artificial Sequence
  Synthetic: TandemPep.VGLL4.TDU2
tcaagcttttggaccctcgtacagaagctaatacgactcactatagggaaataagagagaaaagaagagtaagaagaaatataagagccaccatgagcgttagtattaccggaagcgtggacgaccacttcgccaaggccctgggcgacacctggctgcaaattaagggcagcggcgtaaagcagaccctgaacttcgaccttctgaagctggctggcgatgtggagagtaaccccggccccagcgtgagcataaccggttcagtggacgatcatttcgccaaggcccttggcgacacgtggctgcagatcaaaggctccggcgtgaagcagaccctgaatttcgatctgctgaagttggccggcgacgtggagagcaaccccggccccagcgtgagcatcaccggcagcgtggacgaccacttcgccaaggccctgggcgacacctggctgcagatcaagggcaagcccatccccaaccccctgctgggcctggacagcacctgataataggctggagcctcggtggccatgcttcttgccccttgggcctccccccagcccctcctccccttcctgcacccgtacccccgtggtctttgaataaagtctgagtgggcggc

SEQ ID NO: 551 - DNA, 586 bp, Artificial Sequence
  Synthetic: TandemPep.STAT3.DBD (5 UTR, ORF, 3 UTR)
tcaagcttttggaccctcgtacagaagctaatacgactcactatagggaaataagagagaaaagaagagtaagaagaaatataagagccaccatgcccctgaccgccgtgttctggctgatctacgtgttggctaaggccctggtgaccgtgtgcggaagcggagtgaaacagaccttgaactttgacctgctgaagctggccggagacgtggaaagcaaccccggcccccccctgaccgcagtgttttggctgatatacgtgctggccaaggccctggtgactgtgtgcggcagcggcgtgaagcagaccctgaacttcgacctgctgaagctggccggcgacgtcgagagcaaccccggcccccccctgaccgccgtgttctggttgatatatgtgctggccaaggccctggtgacagtgtgcggcaagcccatcccaaaccccctgcttggcctggatagcacctgataataggctggagcctcggtggccatgcttcttgccccttgggcctccccccagcccctcctccccttcctgcacccgtacccccgtggtctttgaataaagtctgagtgggcggc

SEQ ID NO: 552 - protein, 4 aa, Artificial Sequence
  Synthetic: Linker
GGGS

1. A messenger RNA (mRNA) encoding at least one intracellular binding domain, wherein said mRNA comprises one or more modified nucleobases.

2. (canceled)

3. The mRNA of claim 1, wherein the at least one intracellular binding domain is selected from the group consisting of: a Bcl-2 homology (BH3) domain, a TOPK inhibitory peptide, a SALL4 inhibitory peptide, a Ras inhibitory peptide, a p53 inhibitory peptide, a PP2a inhibitory peptide, a STAT3 inhibitory peptide and a YAP inhibitory peptide.

4. (canceled)

5. The mRNA of claim 1, which encodes two to ten intracellular binding domains.

6. (canceled)

7. The mRNA of claim 5, wherein the BH3 domains are selected from the group consisting of PUMA BH3, Bim BH3, Bad BH3, Noxa BH3, Beclin BH3, truncated BID containing a BH3 domain, and combinations thereof.

8-9. (canceled)

10. The mRNA of claim 1, which further encodes a linker located between each intracellular binding domain.

11. (canceled)

12. The mRNA of claim 10, wherein the linker is a cleavable linker selected from the group consisting of F2A linker, P2A linker, T2A linker, E2A linker, a gly-ser linker and combinations thereof.

13-14. (canceled)

15. The mRNA of claim 1, which further comprises one or more microRNA (miR) binding sites.

16-17. (canceled)

18. The mRNA of claim 15, which comprises an miR122 binding site, an miR142.3p binding site, or a combination of both.

19. The mRNA of claim 18, which further comprises at least one IRES sequence.

20-50. (canceled)

51. The mRNA of claim 1, wherein the at least one chemically modified nucleobase is selected from the group consisting of pseudouracil (ψ), N1-methylpseudouracil (m1ψ), 2-thiouracil (s2U), 4′-thiouracil, 5-methylcytosine, 5-methyluracil, and any combination thereof.

52-53. (canceled)

54. The mRNA of claim 51, wherein the mRNA further comprises a 5′ UTR.

55. The mRNA of claim 54, wherein the 5′ UTR comprises a nucleic acid sequence at least 90%, at least about 95%, at least about 96%, at least about 97%, at least about 98%, at least about 99%, or about 100% identical to a 5′UTR sequence selected from the group consisting of SEQ ID NO: 327-351, or any combination thereof.

56. The mRNA of claim 54, wherein the mRNA further comprises a 3′ UTR, wherein the 3′ UTR comprises a nucleic acid sequence at least about 90%, at least about 95%, at least about 96%, at least about 97%, at least about 98%, at least about 99%, or about 100% identical to a 3′UTR sequence selected from the group consisting of SEQ ID NO: 352-369, or any combination thereof, and wherein the mRNA comprises a microRNA binding site located within the 3′ UTR.

57-58. (canceled)

59. The mRNA of claim 56, wherein the mRNA further comprises a 5′ terminal cap, wherein the 5′ terminal cap comprises a Cap0, Cap1, ARCA, inosine, N1-methyl-guanosine, 2′-fluoro-guanosine, 7-deaza-guanosine, 8-oxo-guanosine, 2-amino-guanosine, LNA-guanosine, 2-azidoguanosine, Cap2, Cap4, 5′ methylG cap, or an analog thereof.

60. (canceled)

61. The mRNA of claim 59, wherein the mRNA further comprises a poly-A region, has about 10 to about 200, about 20 to about 180, about 50 to about 160, about 70 to about 140, about 80 to about 120 nucleotides in length.

62-63. (canceled)

64. The mRNA of claim 61, wherein upon administration to a subject, the mRNA has:
(i) a longer plasma half-life;
(ii) increased expression of at least one intracellular binding domain encoded by the ORF;
(iii) a lower frequency of arrested translation resulting in an expression fragment;
(iv) greater structural stability; or
(v) any combination thereof,
relative to a corresponding mRNA encoding the at least one intracellular binding domain.

65-102. (canceled)

103. A lipid nanoparticle comprising the mRNA of claim 1.

104. (canceled)

105. The lipid nanoparticle of claim 103, wherein the lipid nanoparticle comprises a cationic and/or ionizable lipid.

106. The lipid nanoparticle of claim 105, wherein the cationic and/or ionizable lipid is DLin-KC2-DMA or DLin-MC3-DMA.

107-108. (canceled)

109. A pharmaceutical composition comprising the lipid nanoparticle of claim 103, and a pharmaceutically acceptable carrier, diluent or excipient.

110-118. (canceled)

119. A method for treating a cancer in a subject in need thereof, the method comprising inducing apoptosis in a cell by contacting the cell with an effective amount of the mRNA of claim 1.

120. (canceled)

121. The method of claim 119, wherein the subject is a human.

122. The method of claim 121, wherein the cancer is liver cancer, colorectal cancer, hepatocellular carcinoma, acute myeloid leukemia, chronic myeloid leukemia, chronic myleomonocytic leukemia, myelodysplastic syndrome, myeloproliferative disease, a primary tumor, or a metastasis.

123-126. (canceled)

127. The mRNA of claim 1, further encoding a scaffold polypeptide selected from a group comprising wild-type SteA, STM, SQM, and SQT.
